United States Patent Application Publication US 2025/0333767 A1 - sequence listing, part 15

SEQ ID NO: 48974 - protein, 977 aa, synthetic construct
  REGION 1..977: note = engineered CasX variant
QEIKRINKIRRRLVKDSNTKKAGKTGPMKTLLVRVMTPDLRERLENLRKKPENIPQPISNTSRANLNKLLTDYTEMKKAILHVYWEEFQKDPVGLMSRVAQPASKKIDQNKLKPEMDEKGNLTTAGFACSQCGQPLFVYKLEQVSEKGKAYTNYFGRCNVAEHEKLIQLAQLKPEKDSDEAVTYSLGKFGQRALDFYSIHVTKESTHPVKPLAQIAGNRYASPVGKALRDACMGTIASFLSKYQDIIIEHQKVVKGNQKRLESLRELAGKENLEYPSVTLPPQPHTKEGVDAYNEVIARVRMWVNLNLWQKLKLSRDDAKPLLRLKGFPSFPLVERQANEVDWWDMVCNVKKLINEKKEDGKVFWQNLAGYKRQEALRPYLSSEEDRKKGKKFARYQLGDLLLHLEKKHGEDWGKVYDEAWERIDKKVEGLSKHIKLEEERRSEDAQSKAALTDWLRAKASFVIEGLKEADKDEFCRCELKLQKWYGDLRGKPFAIEAENSILDISGFSKQYNCAFIWQKDGVKKLNLYLIINYFKGGKLRFKKIKPEAFEANRFYTVINKKSGEIVPMEVNFNFDDPNLIILPLAFGKRQGREFIWNDLLSLETGSLKLANGRVIEKTLYNRRTRQDEPALFVALTFERREVLDSSNIKPMNLIGVDRGENIPAVIALTDPEGCPLSRFKDSLGNPTHILRIGESYKEKQRTIQAKKEVEQRRAGGYSRKYASKAKNLADDMVRNTARDLLYYAVTQDAMLIFENLSRGFGRQGKRTFMAERQYTRMEDWLTAKLAYEGLPSKTYLSKTLAQYTSKTCSNCGFTITSADYDRVLEKLKKTATGWMTTINGKELKVEGQITYYNRYKRQNVVKDLSVELDRLSEESVNNDISSWTKGRSGEALSLLKKRFSHRPVQEKFVCLNCGFETHADEQAALNIARSWLFLRSQEYKKYQTNKTTGNTDKRAFVETWQSFYRKKLKEVWKPAV

SEQ ID NO: 48975 - protein, 977 aa, synthetic construct
  REGION 1..977: note = engineered CasX variant
QEIKRINKIRRRLVKDSNTKKAGKTGPMKTLLVRVMTPDLRERLENLRKKPENIPQPISNTSRANLNKLLTDYTEMKKAILHVYWEEFQKDPVGLMSRVAQPASKKIDQNKLKPEMDEKGNLTTAGFACSQCGQPLFVYKLEQVSEKGKAYTNYFGRCNVAEHEKLILLAQLKPEKDSDEAVTYSLGKFGQRALDFYSIHVTKESTHPVKPLAQIAGNRYASPVGKALRDACMGTIASFLSKYQDIIIEHQKVVKGNQKRLESLRELAGKENLEYPSVTLPPQPHTKEGVDAYNEVIARVRMWVNLNLWQKLKLSRDDAKPLLRLKGFPSFPLVERQANEVDWWDMVCNVKKLINEKKEDGKVFWQNLAIYKRQEALRPYLSSEEDRKKGKKFARYQLGDLLLHLEKKHGEDWGKVYDEAWERIDKKVEGLSKHIKLEEERRSEDAQSKAALTDWLRAKASFVIEGLKEADKDEFCRCELKLQKWYGDLRGKPFAIEAENSILDISGFSKQYNCAFIWQKDGVKKLNLYLIINYFKGGKLRFKKIKPEAFEANRFYTVINKKSGEIVPMEVNFNFDDPNLIILPLAFGKRQGREFIWNDLLSLETGSLKLANGRVIEKTLYNRRTRQDEPALFVALTFERREVLDSSNIKPMNLIGVDRGENIPAVIALTDPEGCPLSRFKDSLGNPTHILRIGESYKEKQRTIQAKKEVEQRRAGGYSRKYASKAKNLADDMVRNTARDLLYYAVTQDAMLIFENLSRGFGRQGKRTFMAERQYTRMEDWLTAKLAYEGLPSKTYLSKTLAQYTSKTCSNCGFTITSADYDRVLEKLKKTATGWMTTINGKELKVEGQITYYNRYKRQNVVKDLSVELDRLSEESVNNDISSWTKGRSGEALSLLKKRFSHRPVQEKFVCLNCGFETHADEQAALNIARSWLFLRSQEYKKYQTNKTTGNTDKRAFVETWQSFYRKKLKEVWKPAV

SEQ ID NO: 48976 - protein, 977 aa, synthetic construct
  REGION 1..977: note = engineered CasX variant
QEIKRINKIRRRLVKDSNTKKAGKTGPMKTLLVRVMTPDLRERLENLRKKPENIPQPISNTSRANLNKLLTDYTEMKKAILHVYWEEFQKDPVGLMSRVAQPASKKIDQNKLKPEMDEKGNLTTAGFACSQCGQPLFVYKLEQVSEKGKAYTNYFGRCNVAEHEKLILLAQLKPEKDSDEAVTYSLGKFGQRALDFYSIHVTKESTHPVKPLAQIAGNRYASPVGKALRDACMGTIASFLSKYQDIIIEHQKVVKGNQKRLESLRELAGKENLEYPSVTLPPQPHTKEGVDAYNEVIARVRMWVNLNLWQKLKLSRDDAKPLLRLKGFPSFPLVERQANEVDWWDMVCNVKKLINEKKEDGKVFWQNLAGYKRQEALRPYLSSEEDREKGKKFARYQLGDLLLHLEKKHGEDWGKVYDEAWERIDKKVEGLSKHIKLEEERRSEDAQSKAALTDWLRAKASFVIEGLKEADKDEFCRCELKLQKWYGDLRGKPFAIEAENSILDISGFSKQYNCAFIWQKDGVKKLNLYLIINYFKGGKLRFKKIKPEAFEANRFYTVINKKSGEIVPMEVNFNFDDPNLIILPLAFGKRQGREFIWNDLLSLETGSLKLANGRVIEKTLYNRRTRQDEPALFVALTFERREVLDSSNIKPMNLIGVDRGENIPAVIALTDPEGCPLSRFKDSLGNPTHILRIGESYKEKQRTIQAKKEVEQRRAGGYSRKYASKAKNLADDMVRNTARDLLYYAVTQDAMLIFENLSRGFGRQGKRTFMAERQYTRMEDWLTAKLAYEGLPSKTYLSKTLAQYTSKTCSNCGFTITSADYDRVLEKLKKTATGWMTTINGKELKVEGQITYYNRYKRQNVVKDLSVELDRLSEESVNNDISSWTKGRSGEALSLLKKRFSHRPVQEKFVCLNCGFETHADEQAALNIARSWLFLRSQEYKKYQTNKTTGNTDKRAFVETWQSFYRKKLKEVWKPAV

SEQ ID NO: 48977 - protein, 977 aa, synthetic construct
  REGION 1..977: note = engineered CasX variant
QEIKRINKIRRRLVKDSNTKKAGKTGPMKTLLVRVMTPDLRERLENLRKKPENIPQPISNTSRANLNKLLTDYTEMKKAILHVYWEEFQKDPVGLMSRVAQPASKKIDQNKLKPEMDEKGNLTTAGFACSQCGQPLFVYKLEQVSEKGKAYTNYFGRCNVAEHEKLILLAQLKPEKDSDEAVTYSLGKFGQRALDFYSIHVTKESTHPVKPLAQIAGNRYASPVGKALRDACMGTIASFLSKYQDIIIEHQKVVKGNQKRLESLRELAGKENLEYPSVTLPPQPHTKEGVDAYNEVIARVRMWVNLNLWQKLKLSRDDAKPLLRLKGFPSFPLVERQANEVDWWDMVCNVKKLINEKKEDGKVFWQNLAGYKRQEALRPYLSSEEDRKKGKKFARYQLGDLLLHLEKKHGEDWGKVYDEAWERIDKKVEGLSKHIKLEEERRSEDAQSKAALTDWLRAKASFVIEGLKEADKDEFCRCELKLQKWYGDLRGKPFAIEAENSILDISGFSKQYNCAFIWQKDGVKKLNLYLIINYFKGGKLRFKKIKPEAFEANRFYTVINKKSGEIVIMEVNFNFDDPNLIILPLAFGKRQGREFIWNDLLSLETGSLKLANGRVIEKTLYNRRTRQDEPALFVALTFERREVLDSSNIKPMNLIGVDRGENIPAVIALTDPEGCPLSRFKDSLGNPTHILRIGESYKEKQRTIQAKKEVEQRRAGGYSRKYASKAKNLADDMVRNTARDLLYYAVTQDAMLIFENLSRGFGRQGKRTFMAERQYTRMEDWLTAKLAYEGLPSKTYLSKTLAQYTSKTCSNCGFTITSADYDRVLEKLKKTATGWMTTINGKELKVEGQITYYNRYKRQNVVKDLSVELDRLSEESVNNDISSWTKGRSGEALSLLKKRFSHRPVQEKFVCLNCGFETHADEQAALNIARSWLFLRSQEYKKYQTNKTTGNTDKRAFVETWQSFYRKKLKEVWKPAV

SEQ ID NO: 48978 - protein, 978 aa, synthetic construct
  REGION 1..978: note = engineered CasX variant
QEIKRINKIRRRLVKDSNTKKAGKTGPMKTLLVRVMTPDLRERLENLRKKPENIPQPISNTSRANLNKLLTDYTEMKKAILHVYWEEFQKDPVGLMSRVAQPASKKIDQNKLKPEMDEKGNLTTAGFACSQCGQPLFVYKLEQVSEKGKAYTNYFGRCNVAEHEKLILLAQLKPEKDSDEAVTYSLGKFGQRALDFYSIHVTKESTHPVKPLAQIAGNRYASGPVGKALRGACMGTIASFLSKYQDIIIEHQKVVKGNQKRLESLRELAGKENLEYPSVTLPPQPHTSEGVDAYNEVIARVRMWVNLNLWQKLKLSRDDAKPLLRLKGFPSFPLVERQANEVDWWDMVCNVKKLINEKKEDGKVFWQNLAGYKRQEALRPYLSSEEDRKKGKKFARYQLGDLLLHLEKKHGEDWGKVYDEAWERIDKKVEGLSKHIKLEEERRSEDAQSKAALTDWLRAKASFVIEGLKEADKDEFCRCELKLQKWYGDLRGKPFAIEAENSILDISGFSKQYNCAFIWQKDGVKKLNLYLIINYFKGGKLRFKKIKPEAFEANRFYTVINKKSGEIVPMEVNFNFDDPNLIILPLAFGKRQGREFIWNDLLSLETGSLKLANGRVIEKTLYNRRTRQDEPALFVALTFERREVLDSSNIKPMNLIGVDRGENIPAVIALTDPEGCPLSRFKDSLGNPTHILRIGESYKEKQRTIQAKKEVEQRRAGGYSRKYASKAKNLADDMVRNTARDLLYYAVTQDAMLIFENLSRGFGRQGKRTFMAERQYTRMEDWLTAKLAYEGLPSKTYLSKTLAQYTSKTCSNCGFTITSADYDRVLEKLKKTATGWMTTINGKELKVEGQITYYNRYKRQNVVKDLSVELDRLSEESVNNDISSWTKGRSGEALSLLKKRFSHRPVQEKFVCLNCGFETHADEQAALNIARSWLFLRSQEYKKYQTNKTTGNTDKRAFVETWQSFYRKKLKEVWKPAV

SEQ ID NO: 48979 - protein, 978 aa, synthetic construct
  REGION 1..978: note = engineered CasX variant
QEIKRINKIRRRLVKDSNTKKAGKTGPMKTLLVRVMTPDLRERLENLRKKPENIPQPISNTSRANLNKLLTDYTEMKKAILHVYWEEFQKDPVGLMSRVAQPASKKIDQNKLKPEMDEKGNLTTAGFACSQCGQPLFVYKLEQVSEKGKAYTNYFGRCNVAEHEKLILLAQLKPEKDSDEAVTYSLGKFGQRALDFYSIHVTKESTHPVKPLAQIAGNRYASGPVGKALRDACMGTIASFLSKYQDIIIEHQKVVKGNQKRLESLRELAGKENLEYPSVTLPPQPHTSEGVDAYNEVIARVRMWVNLNLWQKLKLSRDDAKPLLRLKNFPSFPLVERQANEVDWWDMVCNVKKLINEKKEDGKVFWQNLAGYKRQEALRPYLSSEEDRKKGKKFARYQLGDLLLHLEKKHGEDWGKVYDEAWERIDKKVEGLSKHIKLEEERRSEDAQSKAALTDWLRAKASFVIEGLKEADKDEFCRCELKLQKWYGDLRGKPFAIEAENSILDISGFSKQYNCAFIWQKDGVKKLNLYLIINYFKGGKLRFKKIKPEAFEANRFYTVINKKSGEIVPMEVNFNFDDPNLIILPLAFGKRQGREFIWNDLLSLETGSLKLANGRVIEKTLYNRRTRQDEPALFVALTFERREVLDSSNIKPMNLIGVDRGENIPAVIALTDPEGCPLSRFKDSLGNPTHILRIGESYKEKQRTIQAKKEVEQRRAGGYSRKYASKAKNLADDMVRNTARDLLYYAVTQDAMLIFENLSRGFGRQGKRTFMAERQYTRMEDWLTAKLAYEGLPSKTYLSKTLAQYTSKTCSNCGFTITSADYDRVLEKLKKTATGWMTTINGKELKVEGQITYYNRYKRQNVVKDLSVELDRLSEESVNNDISSWTKGRSGEALSLLKKRFSHRPVQEKFVCLNCGFETHADEQAALNIARSWLFLRSQEYKKYQTNKTTGNTDKRAFVETWQSFYRKKLKEVWKPAV

SEQ ID NO: 48980 - protein, 978 aa, synthetic construct
  REGION 1..978: note = engineered CasX variant
QEIKRINKIRRRLVKDSNTKKAGKTGPMKTLLVRVMTPDLRERLENLRKKPENIPQPISNTSRANLNKLLTDYTEMKKAILHVYWEEFQKDPVGLMSRVAQPASKKIDQNKLKPEMDEKGNLTTAGFACSQCGQPLFVYKLEQVSEKGKAYTNYFGRCNVAEHEKLILLAQLKPEKDSDEAVTYSLGKFGQRALDFYSIHVTKESTHPVKPLAQIAGNRYASGPVGKALRDACMGTIASFLSKYQDIIIEHQKVVKGNQKRLESLRELAGKENLEYPSVTLPPQPHTSEGVDAYNEVIARVRMWVNLNLWQKLKLSRDDAKPLLRLKGFPSFPLVERQANEVDWWDMVCNVKKLINEKKEDGKVFWQNLAGYKRQEALRPYLSSEEDRKKGKKFARYQLGDLLNHLEKKHGEDWGKVYDEAWERIDKKVEGLSKHIKLEEERRSEDAQSKAALTDWLRAKASFVIEGLKEADKDEFCRCELKLQKWYGDLRGKPFAIEAENSILDISGFSKQYNCAFIWQKDGVKKLNLYLIINYFKGGKLRFKKIKPEAFEANRFYTVINKKSGEIVPMEVNFNFDDPNLIILPLAFGKRQGREFIWNDLLSLETGSLKLANGRVIEKTLYNRRTRQDEPALFVALTFERREVLDSSNIKPMNLIGVDRGENIPAVIALTDPEGCPLSRFKDSLGNPTHILRIGESYKEKQRTIQAKKEVEQRRAGGYSRKYASKAKNLADDMVRNTARDLLYYAVTQDAMLIFENLSRGFGRQGKRTFMAERQYTRMEDWLTAKLAYEGLPSKTYLSKTLAQYTSKTCSNCGFTITSADYDRVLEKLKKTATGWMTTINGKELKVEGQITYYNRYKRQNVVKDLSVELDRLSEESVNNDISSWTKGRSGEALSLLKKRFSHRPVQEKFVCLNCGFETHADEQAALNIARSWLFLRSQEYKKYQTNKTTGNTDKRAFVETWQSFYRKKLKEVWKPAV

SEQ ID NO: 48981 - protein, 978 aa, synthetic construct
  REGION 1..978: note = engineered CasX variant
QEIKRINKIRRRLVKDSNTKKAGKTGPMKTLLVRVMTPDLRERLENLRKKPENIPQPISNTSRANLNKLLTDYTEMKKAILHVYWEEFQKDPVGLMSRVAQPASKKIDQNKLKPEMDEKGNLTTAGFACSQCGQPLFVYKLEQVSEKGKAYTNYFGRCNVAEHEKLILLAQLKPEKDSDEAVTYSLGKFGQRALDFYSIHVTKESTHPVKPLAQIAGNRYASGPVGKALRDACMGTIASFLSKYQDIIIEHQKVVKGNQKRLESLRELAGKENLEYPSVTLPPQPHTSEGVDAYNEVIARVRMWVNLNLWQKLKLSRDDAKPLLRLKGFPSFPLVERQANEVDWWDMVCNVKKLINEKKEDGKVFWQNLAGYKRQEALRPYLSSEEDRKKGKKFARYQLGDLLWHLEKKHGEDWGKVYDEAWERIDKKVEGLSKHIKLEEERRSEDAQSKAALTDWLRAKASFVIEGLKEADKDEFCRCELKLQKWYGDLRGKPFAIEAENSILDISGFSKQYNCAFIWQKDGVKKLNLYLIINYFKGGKLRFKKIKPEAFEANRFYTVINKKSGEIVPMEVNFNFDDPNLIILPLAFGKRQGREFIWNDLLSLETGSLKLANGRVIEKTLYNRRTRQDEPALFVALTFERREVLDSSNIKPMNLIGVDRGENIPAVIALTDPEGCPLSRFKDSLGNPTHILRIGESYKEKQRTIQAKKEVEQRRAGGYSRKYASKAKNLADDMVRNTARDLLYYAVTQDAMLIFENLSRGFGRQGKRTFMAERQYTRMEDWLTAKLAYEGLPSKTYLSKTLAQYTSKTCSNCGFTITSADYDRVLEKLKKTATGWMTTINGKELKVEGQITYYNRYKRQNVVKDLSVELDRLSEESVNNDISSWTKGRSGEALSLLKKRFSHRPVQEKFVCLNCGFETHADEQAALNIARSWLFLRSQEYKKYQTNKTTGNTDKRAFVETWQSFYRKKLKEVWKPAV

SEQ ID NO: 48982 - protein, 978 aa, synthetic construct
  REGION 1..978: note = engineered CasX variant
QEIKRINKIRRRLVKDSNTKKAGKTGPMKTLLVRVMTPDLRERLENLRKKPENIPQPISNTSRANLNKLLTDYTEMKKAILHVYWEEFQKDPVGLMSRVAQPASKKIDQNKLKPEMDEKGNLTTAGFACSQCGQPLFVYKLEQVSEKGKAYTNYFGRCNVAEHEKLILLAQLKPEKDSDEAVTYSLGKFGQRALDFYSIHVTKESTHPVKPLAQIAGNRYASGPVGKALRDACMGTIASFLSKYQDIIIEHQKVVKGNQKRLESLRELAGKENLEYPSVTLPPQPHTSEGVDAYNEVIARVRMWVNLNLWQKLKLSRDDAKPLLRLKGFPSFPLVERQANEVDWWDMVCNVKKLINEKKEDGKVFWQNLAGYKRQEALRPYLSSEEDRKKGKKFARYQLGDLLLHLYKKHGEDWGKVYDEAWERIDKKVEGLSKHIKLEEERRSEDAQSKAALTDWLRAKASFVIEGLKEADKDEFCRCELKLQKWYGDLRGKPFAIEAENSILDISGFSKQYNCAFIWQKDGVKKLNLYLIINYFKGGKLRFKKIKPEAFEANRFYTVINKKSGEIVPMEVNFNFDDPNLIILPLAFGKRQGREFIWNDLLSLETGSLKLANGRVIEKTLYNRRTRQDEPALFVALTFERREVLDSSNIKPMNLIGVDRGENIPAVIALTDPEGCPLSRFKDSLGNPTHILRIGESYKEKQRTIQAKKEVEQRRAGGYSRKYASKAKNLADDMVRNTARDLLYYAVTQDAMLIFENLSRGFGRQGKRTFMAERQYTRMEDWLTAKLAYEGLPSKTYLSKTLAQYTSKTCSNCGFTITSADYDRVLEKLKKTATGWMTTINGKELKVEGQITYYNRYKRQNVVKDLSVELDRLSEESVNNDISSWTKGRSGEALSLLKKRFSHRPVQEKFVCLNCGFETHADEQAALNIARSWLFLRSQEYKKYQTNKTTGNTDKRAFVETWQSFYRKKLKEVWKPAV

SEQ ID NO: 48983 - protein, 978 aa, synthetic construct
  REGION 1..978: note = engineered CasX variant
QEIKRINKIRRRLVKDSNTKKAGKTGPMKTLLVRVMTPDLRERLENLRKKPENIPQPISNTSRANLNKLLTDYTEMKKAILHVYWEEFQKDPVGLMSRVAQPASKKIDQNKLKPEMDEKGNLTTAGFACSQCGQPLFVYKLEQVSEKGKAYTNYFGRCNVAEHEKLILLAQLKPEKDSDEAVTYSLGKFGQRALDFYSIHVTKESTHPVKPLAQIAGNRYASGPVGKALRDACMGTIASFLSKYQDIIIEHQKVVKGNQKRLESLRELAGKENLEYPSVTLPPQPHTSEGVDAYNEVIARVRMWVNLNLWQKLKLSRDDAKPLLRLKGFPSFPLVERQANEVDWWDMVCNVKKLINEKKEDGKVFWQNLAGYKRQEALRPYLSSEEDRKKGKKFARYQLGDLLLHLEKKHPEDWGKVYDEAWERIDKKVEGLSKHIKLEEERRSEDAQSKAALTDWLRAKASFVIEGLKEADKDEFCRCELKLQKWYGDLRGKPFAIEAENSILDISGFSKQYNCAFIWQKDGVKKLNLYLIINYFKGGKLRFKKIKPEAFEANRFYTVINKKSGEIVPMEVNFNFDDPNLIILPLAFGKRQGREFIWNDLLSLETGSLKLANGRVIEKTLYNRRTRQDEPALFVALTFERREVLDSSNIKPMNLIGVDRGENIPAVIALTDPEGCPLSRFKDSLGNPTHILRIGESYKEKQRTIQAKKEVEQRRAGGYSRKYASKAKNLADDMVRNTARDLLYYAVTQDAMLIFENLSRGFGRQGKRTFMAERQYTRMEDWLTAKLAYEGLPSKTYLSKTLAQYTSKTCSNCGFTITSADYDRVLEKLKKTATGWMTTINGKELKVEGQITYYNRYKRQNVVKDLSVELDRLSEESVNNDISSWTKGRSGEALSLLKKRFSHRPVQEKFVCLNCGFETHADEQAALNIARSWLFLRSQEYKKYQTNKTTGNTDKRAFVETWQSFYRKKLKEVWKPAV

SEQ ID NO: 48984 - protein, 979 aa, synthetic construct
  REGION 1..979: note = engineered CasX variant
QEIKRINKIRRRLVKDSNTKKAGKTGPMKTLLVRVMTPDLRERLENLRKKPENIPQPISNTSRANLNKLLTDYTEMKKAILHVYWEEFQKDPVGLMSRVAQPASKKIDQNKLKPEMDEKGNLTTAGFACSQCGQPLFVYKLEQVSEKGKAYTNYFGRCNVAEHEKLILLAQLKPEKDSDEAVTYSLGKFGQRALDFYSIHVTKESTHPVKPLAQIAGNRYASGPVGKALRDACMGTIASFLSKYQDIIIEHQKVVKGNQKRLESLRELAGKENLEYPSVTLPPQPHTSEGVDAYNEVIARVRMWVNLNLWQKLKLSRDDAKPLLRLKGFPSFPLVERQANEVDWWDMVCNVKKLINEKKEDGKVFWQNLAGYKRQEALRPYLSSEEDRKKGKKFARYQLGDLLLHLEKKHGERDWGKVYDEAWERIDKKVEGLSKHIKLEEERRSEDAQSKAALTDWLRAKASFVIEGLKEADKDEFCRCELKLQKWYGDLRGKPFAIEAENSILDISGFSKQYNCAFIWQKDGVKKLNLYLIINYFKGGKLRFKKIKPEAFEANRFYTVINKKSGEIVPMEVNFNFDDPNLIILPLAFGKRQGREFIWNDLLSLETGSLKLANGRVIEKTLYNRRTRQDEPALFVALTFERREVLDSSNIKPMNLIGVDRGENIPAVIALTDPEGCPLSRFKDSLGNPTHILRIGESYKEKQRTIQAKKEVEQRRAGGYSRKYASKAKNLADDMVRNTARDLLYYAVTQDAMLIFENLSRGFGRQGKRTFMAERQYTRMEDWLTAKLAYEGLPSKTYLSKTLAQYTSKTCSNCGFTITSADYDRVLEKLKKTATGWMTTINGKELKVEGQITYYNRYKRQNVVKDLSVELDRLSEESVNNDISSWTKGRSGEALSLLKKRFSHRPVQEKFVCLNCGFETHADEQAALNIARSWLFLRSQEYKKYQTNKTTGNTDKRAFVETWQSFYRKKLKEVWKPAV

SEQ ID NO: 48985 - protein, 979 aa, synthetic construct
  REGION 1..979: note = engineered CasX variant
QEIKRINKIRRRLVKDSNTKKAGKTGPMKTLLVRVMTPDLRERLENLRKKPENIPQPISNTSRANLNKLLTDYTEMKKAILHVYWEEFQKDPVGLMSRVAQPASKKIDQNKLKPEMDEKGNLTTAGFACSQCGQPLFVYKLEQVSEKGKAYTNYFGRCNVAEHEKLILLAQLKPEKDSDEAVTYSLGKFGQRALDFYSIHVTKESTHPVKPLAQIAGNRYASGPVGKALRDACMGTIASFLSKYQDIIIEHQKVVKGNQKRLESLRELAGKENLEYPSVTLPPQPHTSEGVDAYNEVIARVRMWVNLNLWQKLKLSRDDAKPLLRLKGFPSFPLVERQANEVDWWDMVCNVKKLINEKKEDGKVFWQNLAGYKRQEALRPYLSSEEDRKKGKKFARYQLGDLLLHLEKKHGEYDWGKVYDEAWERIDKKVEGLSKHIKLEEERRSEDAQSKAALTDWLRAKASFVIEGLKEADKDEFCRCELKLQKWYGDLRGKPFAIEAENSILDISGFSKQYNCAFIWQKDGVKKLNLYLIINYFKGGKLRFKKIKPEAFEANRFYTVINKKSGEIVPMEVNFNFDDPNLIILPLAFGKRQGREFIWNDLLSLETGSLKLANGRVIEKTLYNRRTRQDEPALFVALTFERREVLDSSNIKPMNLIGVDRGENIPAVIALTDPEGCPLSRFKDSLGNPTHILRIGESYKEKQRTIQAKKEVEQRRAGGYSRKYASKAKNLADDMVRNTARDLLYYAVTQDAMLIFENLSRGFGRQGKRTFMAERQYTRMEDWLTAKLAYEGLPSKTYLSKTLAQYTSKTCSNCGFTITSADYDRVLEKLKKTATGWMTTINGKELKVEGQITYYNRYKRQNVVKDLSVELDRLSEESVNNDISSWTKGRSGEALSLLKKRFSHRPVQEKFVCLNCGFETHADEQAALNIARSWLFLRSQEYKKYQTNKTTGNTDKRAFVETWQSFYRKKLKEVWKPAV

SEQ ID NO: 48986 - protein, 978 aa, synthetic construct
  REGION 1..978: note = engineered CasX variant
QEIKRINKIRRRLVKDSNTKKAGKTGPMKTLLVRVMTPDLRERLENLRKKPENIPQPISNTSRANLNKLLTDYTEMKKAILHVYWEEFQKDPVGLMSRVAQPASKKIDQNKLKPEMDEKGNLTTAGFACSQCGQPLFVYKLEQVSEKGKAYTNYFGRCNVAEHEKLILLAQLKPEKDSDEAVTYSLGKFGQRALDFYSIHVTKESTHPVKPLAQIAGNRYASGPVGKALRDACMGTIASFLSKYQDIIIEHQKVVKGNQKRLESLRELAGKENLEYPSVTLPPQPHTSEGVDAYNEVIARVRMWVNLNLWQKLKLSRDDAKPLLRLKGFPSFPLVERQANEVDWWDMVCNVKKLINEKKEDGKVFWQNLAGYKRQEALRPYLSSEEDRKKGKKFARYQLGDLLLHLEKKHGEDWGDVYDEAWERIDKKVEGLSKHIKLEEERRSEDAQSKAALTDWLRAKASFVIEGLKEADKDEFCRCELKLQKWYGDLRGKPFAIEAENSILDISGFSKQYNCAFIWQKDGVKKLNLYLIINYFKGGKLRFKKIKPEAFEANRFYTVINKKSGEIVPMEVNFNFDDPNLIILPLAFGKRQGREFIWNDLLSLETGSLKLANGRVIEKTLYNRRTRQDEPALFVALTFERREVLDSSNIKPMNLIGVDRGENIPAVIALTDPEGCPLSRFKDSLGNPTHILRIGESYKEKQRTIQAKKEVEQRRAGGYSRKYASKAKNLADDMVRNTARDLLYYAVTQDAMLIFENLSRGFGRQGKRTFMAERQYTRMEDWLTAKLAYEGLPSKTYLSKTLAQYTSKTCSNCGFTITSADYDRVLEKLKKTATGWMTTINGKELKVEGQITYYNRYKRQNVVKDLSVELDRLSEESVNNDISSWTKGRSGEALSLLKKRFSHRPVQEKFVCLNCGFETHADEQAALNIARSWLFLRSQEYKKYQTNKTTGNTDKRAFVETWQSFYRKKLKEVWKPAV

SEQ ID NO: 48987 - protein, 978 aa, synthetic construct
  REGION 1..978: note = engineered CasX variant
QEIKRINKIRRRLVKDSNTKKAGKTGPMKTLLVRVMTPDLRERLENLRKKPENIPQPISNTSRANLNKLLTDYTEMKKAILHVYWEEFQKDPVGLMSRVAQPASKKIDQNKLKPEMDEKGNLTTAGFACSQCGQPLFVYKLEQVSEKGKAYTNYFGRCNVAEHEKLILLAQLKPEKDSDEAVTYSLGKFGQRALDFYSIHVTKESTHPVKPLAQIAGNRYASGPVGKALRDACMGTIASFLSKYQDIIIEHQKVVKGNQKRLESLRELAGKENLEYPSVTLPPQPHTSEGVDAYNEVIARVRMWVNLNLWQKLKLSRDDAKPLLRLKGFPSFPLVERQANEVDWWDMVCNVKKLINEKKEDGKVFWQNLAGYKRQEALRPYLSSEEDRKKGKKFARYQLGDLLLHLEKKHGEDWGKVYGEAWERIDKKVEGLSKHIKLEEERRSEDAQSKAALTDWLRAKASFVIEGLKEADKDEFCRCELKLQKWYGDLRGKPFAIEAENSILDISGFSKQYNCAFIWQKDGVKKLNLYLIINYFKGGKLRFKKIKPEAFEANRFYTVINKKSGEIVPMEVNFNFDDPNLIILPLAFGKRQGREFIWNDLLSLETGSLKLANGRVIEKTLYNRRTRQDEPALFVALTFERREVLDSSNIKPMNLIGVDRGENIPAVIALTDPEGCPLSRFKDSLGNPTHILRIGESYKEKQRTIQAKKEVEQRRAGGYSRKYASKAKNLADDMVRNTARDLLYYAVTQDAMLIFENLSRGFGRQGKRTFMAERQYTRMEDWLTAKLAYEGLPSKTYLSKTLAQYTSKTCSNCGFTITSADYDRVLEKLKKTATGWMTTINGKELKVEGQITYYNRYKRQNVVKDLSVELDRLSEESVNNDISSWTKGRSGEALSLLKKRFSHRPVQEKFVCLNCGFETHADEQAALNIARSWLFLRSQEYKKYQTNKTTGNTDKRAFVETWQSFYRKKLKEVWKPAV

SEQ ID NO: 48988 - protein, 978 aa, synthetic construct
  REGION 1..978: note = engineered CasX variant
QEIKRINKIRRRLVKDSNTKKAGKTGPMKTLLVRVMTPDLRERLENLRKKPENIPQPISNTSRANLNKLLTDYTEMKKAILHVYWEEFQKDPVGLMSRVAQPASKKIDQNKLKPEMDEKGNLTTAGFACSQCGQPLFVYKLEQVSEKGKAYTNYFGRCNVAEHEKLILLAQLKPEKDSDEAVTYSLGKFGQRALDFYSIHVTKESTHPVKPLAQIAGNRYASGPVGKALRDACMGTIASFLSKYQDIIIEHQKVVKGNQKRLESLRELAGKENLEYPSVTLPPQPHTSEGVDAYNEVIARVRMWVNLNLWQKLKLSRDDAKPLLRLKGFPSFPLVERQANEVDWWDMVCNVKKLINEKKEDGKVFWQNLAGYKRQEALRPYLSSEEDRKKGKKFARYQLGDLLLHLEKKHGEDWGKVYDEAWERIDKKVEGLSKHIKLEEERRSEDAQSKAALTDWLRAKASFVIEGKKEADKDEFCRCELKLQKWYGDLRGKPFAIEAENSILDISGFSKQYNCAFIWQKDGVKKLNLYLIINYFKGGKLRFKKIKPEAFEANRFYTVINKKSGEIVPMEVNFNFDDPNLIILPLAFGKRQGREFIWNDLLSLETGSLKLANGRVIEKTLYNRRTRQDEPALFVALTFERREVLDSSNIKPMNLIGVDRGENIPAVIALTDPEGCPLSRFKDSLGNPTHILRIGESYKEKQRTIQAKKEVEQRRAGGYSRKYASKAKNLADDMVRNTARDLLYYAVTQDAMLIFENLSRGFGRQGKRTFMAERQYTRMEDWLTAKLAYEGLPSKTYLSKTLAQYTSKTCSNCGFTITSADYDRVLEKLKKTATGWMTTINGKELKVEGQITYYNRYKRQNVVKDLSVELDRLSEESVNNDISSWTKGRSGEALSLLKKRFSHRPVQEKFVCLNCGFETHADEQAALNIARSWLFLRSQEYKKYQTNKTTGNTDKRAFVETWQSFYRKKLKEVWKPAV

SEQ ID NO: 48989 - protein, 978 aa, synthetic construct
  REGION 1..978: note = engineered CasX variant
QEIKRINKIRRRLVKDSNTKKAGKTGPMKTLLVRVMTPDLRERLENLRKKPENIPQPISNTSRANLNKLLTDYTEMKKAILHVYWEEFQKDPVGLMSRVAQPASKKIDQNKLKPEMDEKGNLTTAGFACSQCGQPLFVYKLEQVSEKGKAYTNYFGRCNVAEHEKLILLAQLKPEKDSDEAVTYSLGKFGQRALDFYSIHVTKESTHPVKPLAQIAGNRYASGPVGKALRDACMGTIASFLSKYQDIIIEHQKVVKGNQKRLESLRELAGKENLEYPSVTLPPQPHTSEGVDAYNEVIARVRMWVNLNLWQKLKLSRDDAKPLLRLKGFPSFPLVERQANEVDWWDMVCNVKKLINEKKEDGKVFWQNLAGYKRQEALRPYLSSEEDRKKGKKFARYQLGDLLLHLEKKHGEDWGKVYDEAWERIDKKVEGLSKHIKLEEERRSEDAQSKAALTDWLRAKASFVIEGSKEADKDEFCRCELKLQKWYGDLRGKPFAIEAENSILDISGFSKQYNCAFIWQKDGVKKLNLYLIINYFKGGKLRFKKIKPEAFEANRFYTVINKKSGEIVPMEVNFNFDDPNLIILPLAFGKRQGREFIWNDLLSLETGSLKLANGRVIEKTLYNRRTRQDEPALFVALTFERREVLDSSNIKPMNLIGVDRGENIPAVIALTDPEGCPLSRFKDSLGNPTHILRIGESYKEKQRTIQAKKEVEQRRAGGYSRKYASKAKNLADDMVRNTARDLLYYAVTQDAMLIFENLSRGFGRQGKRTFMAERQYTRMEDWLTAKLAYEGLPSKTYLSKTLAQYTSKTCSNCGFTITSADYDRVLEKLKKTATGWMTTINGKELKVEGQITYYNRYKRQNVVKDLSVELDRLSEESVNNDISSWTKGRSGEALSLLKKRFSHRPVQEKFVCLNCGFETHADEQAALNIARSWLFLRSQEYKKYQTNKTTGNTDKRAFVETWQSFYRKKLKEVWKPAV

SEQ ID NO: 48990 - protein, 979 aa, synthetic construct
  REGION 1..979: note = engineered CasX variant
QEIKRINKIRRRLVKDSNTKKAGKTGPMKTLLVRVMTPDLRERLENLRKKPENIPQPISNTSRANLNKLLTDYTEMKKAILHVYWEEFQKDPVGLMSRVAQPASKKIDQNKLKPEMDEKGNLTTAGFACSQCGQPLFVYKLEQVSEKGKAYTNYFGRCNVAEHEKLILLAQLKPEKDSDEAVTYSLGKFGQRALDFYSIHVTKESTHPVKPLAQIAGNRYASGPVGKALRDACMGTIASFLSKYQDIIIEHQKVVKGNQKRLESLRELAGKENLEYPSVTLPPQPHTSEGVDAYNEVIARVRMWVNLNLWQKLKLSRDDAKPLLRLKGFPSFPLVERQANEVDWWDMVCNVKKLINEKKEDGKVFWQNLAGYKRQEALRPYLSSEEDRKKGKKFARYQLGDLLLHLEKKHGEDWGKVYDEAWERIDKKVEGLSKHIKLEEERRSEDAQSKAALTDWLRAKASFVIEGLKEADDKDEFCRCELKLQKWYGDLRGKPFAIEAENSILDISGFSKQYNCAFIWQKDGVKKLNLYLIINYFKGGKLRFKKIKPEAFEANRFYTVINKKSGEIVPMEVNFNFDDPNLIILPLAFGKRQGREFIWNDLLSLETGSLKLANGRVIEKTLYNRRTRQDEPALFVALTFERREVLDSSNIKPMNLIGVDRGENIPAVIALTDPEGCPLSRFKDSLGNPTHILRIGESYKEKQRTIQAKKEVEQRRAGGYSRKYASKAKNLADDMVRNTARDLLYYAVTQDAMLIFENLSRGFGRQGKRTFMAERQYTRMEDWLTAKLAYEGLPSKTYLSKTLAQYTSKTCSNCGFTITSADYDRVLEKLKKTATGWMTTINGKELKVEGQITYYNRYKRQNVVKDLSVELDRLSEESVNNDISSWTKGRSGEALSLLKKRFSHRPVQEKFVCLNCGFETHADEQAALNIARSWLFLRSQEYKKYQTNKTTGNTDKRAFVETWQSFYRKKLKEVWKPAV

SEQ ID NO: 48991 - protein, 979 aa, synthetic construct
  REGION 1..979: note = engineered CasX variant
QEIKRINKIRRRLVKDSNTKKAGKTGPMKTLLVRVMTPDLRERLENLRKKPENIPQPISNTSRANLNKLLTDYTEMKKAILHVYWEEFQKDPVGLMSRVAQPASKKIDQNKLKPEMDEKGNLTTAGFACSQCGQPLFVYKLEQVSEKGKAYTNYFGRCNVAEHEKLILLAQLKPEKDSDEAVTYSLGKFGQRALDFYSIHVTKESTHPVKPLAQIAGNRYASGPVGKALRDACMGTIASFLSKYQDIIIEHQKVVKGNQKRLESLRELAGKENLEYPSVTLPPQPHTSEGVDAYNEVIARVRMWVNLNLWQKLKLSRDDAKPLLRLKGFPSFPLVERQANEVDWWDMVCNVKKLINEKKEDGKVFWQNLAGYKRQEALRPYLSSEEDRKKGKKFARYQLGDLLLHLEKKHGEDWGKVYDEAWERIDKKVEGLSKHIKLEEERRSEDAQSKAALTDWLRAKASFVIEGLKEADKDEFCRCELKLQKWYGDLRGKPFAIEAENSILDISGFSKQYNCAFIWQKDGVKKLNLYLIINYFKGGKLRFKKIKPEAFEANRFYTVINKKSGEIVPMEVNFNFDDPNLIILPLAFGKRQGREFIWNDLLSLETGSLKLANGRVIEKTLYNRRTRQDEPALFVALTFERREVLDSSNIKPMNLIGVDRGENIPAVIALTDPEGCPLSRFKDSLGNPTHILRIGESYKEKQRTIQAKKEVEQRRAGGYSRKYASKAKNLADDMVRNTARDLLYYAVTQDAMLIFENLSRGFGRQGKRTFMAERQYTRMEDWLTAKLAYEGLPSKTYLSKTLAQYTSKTCSNCGFTITSADYDRVLEKLKKTATGWMTTINGKELKVEGQITYYNRYKRQNVVKDLSVELDRLSEESVNNDISSWTKGRSGNEALSLLKKRFSHRPVQEKFVCLNCGFETHADEQAALNIARSWLFLRSQEYKKYQTNKTTGNTDKRAFVETWQSFYRKKLKEVWKPAV

SEQ ID NO: 48992 - protein, 978 aa, synthetic construct
  REGION 1..978: note = engineered CasX variant
QEIKRINKIRRRLVKDSNTKKAGKTGPMKTLLVRVMTPDLRERLENLRKKPENIPQPISNTSRANLNKLLTDYTEMKKAILHVYWEEFQKDPVGLMSRVAQPASKKIDQNKLKPEMDEKGNLTTAGFACSQCGQPLFVYKLEQVSEKGKAYTNYFGRCNVAEHEKLILLAQLKPEKDSDEAVTYSLGKFGQRALDFYSIHVTKESTHPVKPLAQIAGNRYASGPVGKALRDACMGTIASFLSKYQDIIIEHQKVVKGNQKRLESLRELAGKENLEYPSVTLPPQPHTSEGVDAYNEVIARVRMWVNLNLWQKLKLSRDDAKPLLRLKGFPSFPLVERQANEVDWWDMVCNVKKLINEKKEDGKVFWQNLAGYKRQEALRPYLSSEEDRQKGKKFARYQLGDLLLHLEKKHGEDWGKVYDEAWERIDKKVEGLSKHIKLEEERRSEDAQSKAALTDWLRAKASFVIEGLKEADKDEFCRCELKLQKWYGDLRGKPFAIEAENSILDISGFSKQYNCAFIWQKDGVKKLNLYLIINYFKGGKLRFKKIKPEAFEANRFYTVINKKSGEIVPMEVNFNFDDPNLIILPLAFGKRQGREFIWNDLLSLETGSLKLANGRVIEKTLYNRRTRQDEPALFVALTFERREVLDSSNIKPMNLIGVDRGENIPAVIALTDPEGCPLSRFKDSLGNPTHILRIGESYKEKQRTIQAKKEVEQRRAGGYSRKYASKAKNLADDMVRNTARDLLYYAVTQDAMLIFENLSRGFGRQGKRTFMAERQYTRMEDWLTAKLAYEGLPSKTYLSKTLAQYTSKTCSNCGFTITSADYDRVLEKLKKTATGWMTTINGKELKVEGQITYYNRYKRQNVVKDLSVELDRLSEESVNNDISSWTKGRSGEALSLLKKRFSHRPVQEKFVCLNCGFETHADEQAALNIARSWLFLRSQEYKKYQTNKTTGNTDKRAFVETWQSFYRKKLKEVWKPAV

SEQ ID NO: 48993 - protein, 978 aa, synthetic construct
  REGION 1..978: note = engineered CasX variant
QEIKRINKIRRRLVKDSNTKKAGKTGPMKTLLVRVMTPDLRERLENLRKKPENIPQPISNTSRANLNKLLTDYTEMKKAILHVYWEEFQKDPVGLMSRVAQPASKKIDQNKLKPEMDEKGNLTTAGFACSQCGQPLFVYKLEQVSEKGKAYTNYFGRCNVAEHEKLILLAQLKPEKDSDEAVTYSLGKFGQRALDFYSIHVTKESTHPVKPLAQIAGNRYASGPVGKALRDACMGTIASFLSKYQDIIIEHQKVVKGNQKRLESLRELAGKENLEYPSVTLPPQPHTSEGVDAYNEVIARVRMWVNLNLWQKLKLSRDDAKPLLRLKGFPSFPLVERQANEVDWWDMVCNVKKLINEKKEDGKVFWQNLAGYKRQEALRPYLSSEEDRKKGKKFARYQLGDLLLHLEKKHGEDWGKVYDEAWERIDKKVEGLSKHIKLEEERRSEDAQSKAALTDWLRAKASFVIEGLKEADKDEFCRCELKLQKWYGDLRGKPFAIEAENSILDISGFSKQYNCAFIWQKDGVKKLNLYLIINYFKGGKLRFKKIKPEAFEANRFYTVINKKSGEIVPMEVNFNFDDPNLIILPLAFGKRQGREFIWNDLLSLETGSLKLANGRVIEKTLYNRRTRQDEPALFVALTFERREVLDSSNIKPMNLIGVDRGENIPAVIALTDPEGCPLSRFKDSLGNPTHILRIGESYKEKQRTIQAKKEVEQRRAGGYSRKYASKAKNLADDMVRNTARDLLYYAVTQDAMLIFENLSRGFGRQGKRTFMAERQYTRMEDWLTAKLAYEGLPSQTYLSKTLAQYTSKTCSNCGFTITSADYDRVLEKLKKTATGWMTTINGKELKVEGQITYYNRYKRQNVVKDLSVELDRLSEESVNNDISSWTKGRSGEALSLLKKRFSHRPVQEKFVCLNCGFETHADEQAALNIARSWLFLRSQEYKKYQTNKTTGNTDKRAFVETWQSFYRKKLKEVWKPAV

SEQ ID NO: 48994 - protein, 978 aa, synthetic construct
  REGION 1..978: note = engineered CasX variant
QEIKRINKIRRRLVKDSNTKKAGKTGPMKTLLVRVMTPDLRERLENLRKKPENIPQPISNTSRANLNKLLTDYTEMKKAILHVYWEEFQKDPVGLMSRVAQPASKKIDQNKLKPEMDEKGNLTTAGFACSQCGQPLFVYKLEQVSEKGKAYTNYFGRCNVAEHEKLILLAQLKPEKDSDEAVTYSLGKFGQRALDFYSIHVTKESTHPVKPLAQIAGNRYASGPVGKALRDACMGTIASFLSKYQDIIIEHQKVVKGNQKRLESLRELAGKENLEYPSVTLPPQPHTSEGVDAYNEVIARVRMWVNLNLWQKLKLSRDDAKPLLRLKGFPSFPLVERQANEVDWWDMVCNVKKLINEKKEDGKVFWQNLAGYKRQEALRPYLSSEEDRKKGKKFARYQLGDLLLHLEKKHGEDWGKVYDEAWERIDKKVEGLSKHIKLEEERRSEDAQSKAALTDWLRAKASFVIEGLKEADKDEFCRCELKLQKWYGDLRGKPFAIEAENSILDISGFSKQYNCAFIWQKDGVKKLNLYLIINYFKGGKLRFKKIKPEAFEANRFYTVINKKSGEIVPMEVNFNFDDPNLIILPLAFGKRQGREFIWNDLLSLETGSLKLANGRVIEKTLYNRRTRQDEPALFVALTFERREVLDSSNIKPMNLIGVDRGENIPAVIALTDPEGCPLSRFKDSLGNPTHILRIGESYKEKQRTIQAKKEVEQRRAGGYSRKYASKAKNLADDMVRNTARDLLYYAVTQDAMLIFENLSRGFGRQGKRTFMAERQYTRMEDWLTAKLAYNGLPSKTYLSKTLAQYTSKTCSNCGFTITSADYDRVLEKLKKTATGWMTTINGKELKVEGQITYYNRYKRQNVVKDLSVELDRLSEESVNNDISSWTKGRSGEALSLLKKRFSHRPVQEKFVCLNCGFETHADEQAALNIARSWLFLRSQEYKKYQTNKTTGNTDKRAFVETWQSFYRKKLKEVWKPAV

SEQ ID NO: 48995 - protein, 978 aa, synthetic construct
  REGION 1..978: note = engineered CasX variant
QEIKRINKIRRRLVKDSNTKKAGKTGPMKTLLVRVMTPDLRERLENLRKKPENIPQPISNTSRANLNKLLTDYTEMKKAILHVYWEEFQKDPVGLMSRVAQPASKKIDQNKLKPEMDEKGNLTTAGFACSQCGQPLFVYKLEQVSEKGKAYTNYFGRCNVAEHEKLIQLAQLKPEKDSDEAVTYSLGKFGQRALDFYSIHVTKESTHPVKPLAQIAGNRYASGPVGKALRDACMGTIASFLSKYQDIIIEHQKVVKGNQKRLESLRELAGKENLEYPSVTLPPQPHTSEGVDAYNEVIARVRMWVNLNLWQKLKLSRDDAKPLLRLKGFPSFPLVERQANEVDWWDMVCNVKKLINEKKEDGKVFWQNLAGYKRQEALRPYLSSEEDRKKGKKFARYQLGDLLLHLEKKHGEDWGKVYDEAWERIDKKVEGLSKHIKLEEERRSEDAQSKAALTDWLRAKASFVIEGLKEADKDEFCRCELKLQKWYGDLRGKPFAIEAENSILDISGFSKQYNCAFIWQKDGVKKLNLYLIINYFKGGKLRFKKIKPEAFEANRFYTVINKKSGEIVPMEVNFNFDDPNLIILPLAFGKRQGREFIWNDLLSLETGSLKLANGRVIEKTLYNRRTRQDEPALFVALTFERREVLDSSNIKPMNLIGVDRGENIPAVIALTDPEGCPLSRFKDSLGNPTHILRIGESYKEKQRTIQAKKEVEQRRAGGYSRKYASKAKNLADDMVRNTARDLLYYAVTQDAMLIFENLSRGFGRQGKRTFMAERQYTRMEDWLTAKLAYEGLPSKTYLSKTLAQYTSKTCSNCGFTITSADYDRVLEKLKKTATGWMTTINGKELKVEGQITYYNRYKRQNVVKDLSVELDRLSEESVNNDISSWTKGRSGEALSLLKKRFSHRPVQEKFVCLNCGFETHADEQAALNIARSWLFLRSQEYKKYQTNKTTGNTDKRAFVETWQSFYRKKLKEVWKPAV

SEQ ID NO: 48996 - protein, 978 aa, synthetic construct
  REGION 1..978: note = engineered CasX variant
QEIKRINKIRRRLVKDSNTKKAGKTGPMKTLLVRVMTPDLRERLENLRKKPENIPQPISNTSRANLNKLLTDYTEMKKAILHVYWEEFQKDPVGLMSRVAQPASKKIDQNKLKPEMDEKGNLTTAGFACSQCGQPLFVYKLEQVSEKGKAYTNYFGRCNVAEHEKLILLAQLKPEKDSDEAVTYSLGKFGQRALDFYSIHVTKESTHPVKPLAQIAGNRYASGPVGKALRDACMGTIASFLSKYQDIIIEHQKVVKGNQKRLESLRELAGKENLEYPSVTLPPQPHTSEGVDAYNEVIARVRMWVNLNLWQKLKLSRDDAKPLLRLKGFPSFPLVERQANEVDWWDMVCNVKKLINEKKEDGKVFWQNLAIYKRQEALRPYLSSEEDRKKGKKFARYQLGDLLLHLEKKHGEDWGKVYDEAWERIDKKVEGLSKHIKLEEERRSEDAQSKAALTDWLRAKASFVIEGLKEADKDEFCRCELKLQKWYGDLRGKPFAIEAENSILDISGFSKQYNCAFIWQKDGVKKLNLYLIINYFKGGKLRFKKIKPEAFEANRFYTVINKKSGEIVPMEVNFNFDDPNLIILPLAFGKRQGREFIWNDLLSLETGSLKLANGRVIEKTLYNRRTRQDEPALFVALTFERREVLDSSNIKPMNLIGVDRGENIPAVIALTDPEGCPLSRFKDSLGNPTHILRIGESYKEKQRTIQAKKEVEQRRAGGYSRKYASKAKNLADDMVRNTARDLLYYAVTQDAMLIFENLSRGFGRQGKRTFMAERQYTRMEDWLTAKLAYEGLPSKTYLSKTLAQYTSKTCSNCGFTITSADYDRVLEKLKKTATGWMTTINGKELKVEGQITYYNRYKRQNVVKDLSVELDRLSEESVNNDISSWTKGRSGEALSLLKKRFSHRPVQEKFVCLNCGFETHADEQAALNIARSWLFLRSQEYKKYQTNKTTGNTDKRAFVETWQSFYRKKLKEVWKPAV

SEQ ID NO: 48997 - protein, 978 aa, synthetic construct
  REGION 1..978: note = engineered CasX variant
QEIKRINKIRRRLVKDSNTKKAGKTGPMKTLLVRVMTPDLRERLENLRKKPENIPQPISNTSRANLNKLLTDYTEMKKAILHVYWEEFQKDPVGLMSRVAQPASKKIDQNKLKPEMDEKGNLTTAGFACSQCGQPLFVYKLEQVSEKGKAYTNYFGRCNVAEHEKLILLAQLKPEKDSDEAVTYSLGKFGQRALDFYSIHVTKESTHPVKPLAQIAGNRYASGPVGKALRDACMGTIASFLSKYQDIIIEHQKVVKGNQKRLESLRELAGKENLEYPSVTLPPQPHTSEGVDAYNEVIARVRMWVNLNLWQKLKLSRDDAKPLLRLKGFPSFPLVERQANEVDWWDMVCNVKKLINEKKEDGKVFWQNLAGYKRQEALRPYLSSEEDREKGKKFARYQLGDLLLHLEKKHGEDWGKVYDEAWERIDKKVEGLSKHIKLEEERRSEDAQSKAALTDWLRAKASFVIEGLKEADKDEFCRCELKLQKWYGDLRGKPFAIEAENSILDISGFSKQYNCAFIWQKDGVKKLNLYLIINYFKGGKLRFKKIKPEAFEANRFYTVINKKSGEIVPMEVNFNFDDPNLIILPLAFGKRQGREFIWNDLLSLETGSLKLANGRVIEKTLYNRRTRQDEPALFVALTFERREVLDSSNIKPMNLIGVDRGENIPAVIALTDPEGCPLSRFKDSLGNPTHILRIGESYKEKQRTIQAKKEVEQRRAGGYSRKYASKAKNLADDMVRNTARDLLYYAVTQDAMLIFENLSRGFGRQGKRTFMAERQYTRMEDWLTAKLAYEGLPSKTYLSKTLAQYTSKTCSNCGFTITSADYDRVLEKLKKTATGWMTTINGKELKVEGQITYYNRYKRQNVVKDLSVELDRLSEESVNNDISSWTKGRSGEALSLLKKRFSHRPVQEKFVCLNCGFETHADEQAALNIARSWLFLRSQEYKKYQTNKTTGNTDKRAFVETWQSFYRKKLKEVWKPAV

SEQ ID NO: 48998 - protein, 978 aa, synthetic construct
  REGION 1..978: note = engineered CasX variant
QEIKRINKIRRRLVKDSNTKKAGKTGPMKTLLVRVMTPDLRERLENLRKKPENIPQPISNTSRANLNKLLTDYTEMKKAILHVYWEEFQKDPVGLMSRVAQPASKKIDQNKLKPEMDEKGNLTTAGFACSQCGQPLFVYKLEQVSEKGKAYTNYFGRCNVAEHEKLILLAQLKPEKDSDEAVTYSLGKFGQRALDFYSIHVTKESTHPVKPLAQIAGNRYASGPVGKALRDACMGTIASFLSKYQDIIIEHQKVVKGNQKRLESLRELAGKENLEYPSVTLPPQPHTSEGVDAYNEVIARVRMWVNLNLWQKLKLSRDDAKPLLRLKGFPSFPLVERQANEVDWWDMVCNVKKLINEKKEDGKVFWQNLAGYKRQEALRPYLSSEEDRKKGKKFARYQLGDLLLHLEKKHGEDWGKVYDEAWERIDKKVEGLSKHIKLEEERRSEDAQSKAALTDWLRAKASFVIEGLKEADKDEFCRCELKLQKWYGDLRGKPFAIEAENSILDISGFSKQYNCAFIWQKDGVKKLNLYLIINYFKGGKLRFKKIKPEAFEANRFYTVINKKSGEIVIMEVNFNFDDPNLIILPLAFGKRQGREFIWNDLLSLETGSLKLANGRVIEKTLYNRRTRQDEPALFVALTFERREVLDSSNIKPMNLIGVDRGENIPAVIALTDPEGCPLSRFKDSLGNPTHILRIGESYKEKQRTIQAKKEVEQRRAGGYSRKYASKAKNLADDMVRNTARDLLYYAVTQDAMLIFENLSRGFGRQGKRTFMAERQYTRMEDWLTAKLAYEGLPSKTYLSKTLAQYTSKTCSNCGFTITSADYDRVLEKLKKTATGWMTTINGKELKVEGQITYYNRYKRQNVVKDLSVELDRLSEESVNNDISSWTKGRSGEALSLLKKRFSHRPVQEKFVCLNCGFETHADEQAALNIARSWLFLRSQEYKKYQTNKTTGNTDKRAFVETWQSFYRKKLKEVWKPAV

SEQ ID NO: 48999 - protein, 978 aa, synthetic construct
  REGION 1..978: note = engineered CasX variant
QEIKRINKIRRRLVKDSNTKKAGKTGPMKTLLVRVMTPDLRERLENLRKKPENIPQPISNTSRANLNKLLTDYTEMKKAILHVYWEEFQKDPVGLMSRVAQPASKKIDQNKLKPEMDEKGNLTTAGFACSQCGQPLFVYKLEQVSEKGKAYTNYFGRCNVAEHEKLILLAQLKPEKDSDEAVTYSLGKFGQRALDFYSIHVTKESTHPVKPLAQIAGNRYASGPVGKALRGACMGTIASFLSKYQDIIIEHQKVVKGNQKRLESLRELAGKENLEYPSVTLPPQPHTKEGLDAYNEVIARVRMWVNLNLWQKLKLSRDDAKPLLRLKGFPSFPLVERQANEVDWWDMVCNVKKLINEKKEDGKVFWQNLAGYKRQEALRPYLSSEEDRKKGKKFARYQLGDLLLHLEKKHGEDWGKVYDEAWERIDKKVEGLSKHIKLEEERRSEDAQSKAALTDWLRAKASFVIEGLKEADKDEFCRCELKLQKWYGDLRGKPFAIEAENSILDISGFSKQYNCAFIWQKDGVKKLNLYLIINYFKGGKLRFKKIKPEAFEANRFYTVINKKSGEIVPMEVNFNFDDPNLIILPLAFGKRQGREFIWNDLLSLETGSLKLANGRVIEKTLYNRRTRQDEPALFVALTFERREVLDSSNIKPMNLIGVDRGENIPAVIALTDPEGCPLSRFKDSLGNPTHILRIGESYKEKQRTIQAKKEVEQRRAGGYSRKYASKAKNLADDMVRNTARDLLYYAVTQDAMLIFENLSRGFGRQGKRTFMAERQYTRMEDWLTAKLAYEGLPSKTYLSKTLAQYTSKTCSNCGFTITSADYDRVLEKLKKTATGWMTTINGKELKVEGQITYYNRYKRQNVVKDLSVELDRLSEESVNNDISSWTKGRSGEALSLLKKRFSHRPVQEKFVCLNCGFETHADEQAALNIARSWLFLRSQEYKKYQTNKTTGNTDKRAFVETWQSFYRKKLKEVWKPAV

SEQ ID NO: 49000 - protein, 978 aa, synthetic construct
  REGION 1..978: note = engineered CasX variant
QEIKRINKIRRRLVKDSNTKKAGKTGPMKTLLVRVMTPDLRERLENLRKKPENIPQPISNTSRANLNKLLTDYTEMKKAILHVYWEEFQKDPVGLMSRVAQPASKKIDQNKLKPEMDEKGNLTTAGFACSQCGQPLFVYKLEQVSEKGKAYTNYFGRCNVAEHEKLILLAQLKPEKDSDEAVTYSLGKFGQRALDFYSIHVTKESTHPVKPLAQIAGNRYASGPVGKALRDACMGTIASFLSKYQDIIIEHQKVVKGNQKRLESLRELAGKENLEYPSVTLPPQPHTKEGLDAYNEVIARVRMWVNLNLWQKLKLSRDDAKPLLRLKNFPSFPLVERQANEVDWWDMVCNVKKLINEKKEDGKVFWQNLAGYKRQEALRPYLSSEEDRKKGKKFARYQLGDLLLHLEKKHGEDWGKVYDEAWERIDKKVEGLSKHIKLEEERRSEDAQSKAALTDWLRAKASFVIEGLKEADKDEFCRCELKLQKWYGDLRGKPFAIEAENSILDISGFSKQYNCAFIWQKDGVKKLNLYLIINYFKGGKLRFKKIKPEAFEANRFYTVINKKSGEIVPMEVNFNFDDPNLIILPLAFGKRQGREFIWNDLLSLETGSLKLANGRVIEKTLYNRRTRQDEPALFVALTFERREVLDSSNIKPMNLIGVDRGENIPAVIALTDPEGCPLSRFKDSLGNPTHILRIGESYKEKQRTIQAKKEVEQRRAGGYSRKYASKAKNLADDMVRNTARDLLYYAVTQDAMLIFENLSRGFGRQGKRTFMAERQYTRMEDWLTAKLAYEGLPSKTYLSKTLAQYTSKTCSNCGFTITSADYDRVLEKLKKTATGWMTTINGKELKVEGQITYYNRYKRQNVVKDLSVELDRLSEESVNNDISSWTKGRSGEALSLLKKRFSHRPVQEKFVCLNCGFETHADEQAALNIARSWLFLRSQEYKKYQTNKTTGNTDKRAFVETWQSFYRKKLKEVWKPAV

SEQ ID NO: 49001 - protein, 978 aa, synthetic construct
  REGION 1..978: note = engineered CasX variant
QEIKRINKIRRRLVKDSNTKKAGKTGPMKTLLVRVMTPDLRERLENLRKKPENIPQPISNTSRANLNKLLTDYTEMKKAILHVYWEEFQKDPVGLMSRVAQPASKKIDQNKLKPEMDEKGNLTTAGFACSQCGQPLFVYKLEQVSEKGKAYTNYFGRCNVAEHEKLILLAQLKPEKDSDEAVTYSLGKFGQRALDFYSIHVTKESTHPVKPLAQIAGNRYASGPVGKALRDACMGTIASFLSKYQDIIIEHQKVVKGNQKRLESLRELAGKENLEYPSVTLPPQPHTKEGLDAYNEVIARVRMWVNLNLWQKLKLSRDDAKPLLRLKGFPSFPLVERQANEVDWWDMVCNVKKLINEKKEDGKVFWQNLAGYKRQEALRPYLSSEEDRKKGKKFARYQLGDLLNHLEKKHGEDWGKVYDEAWERIDKKVEGLSKHIKLEEERRSEDAQSKAALTDWLRAKASFVIEGLKEADKDEFCRCELKLQKWYGDLRGKPFAIEAENSILDISGFSKQYNCAFIWQKDGVKKLNLYLIINYFKGGKLRFKKIKPEAFEANRFYTVINKKSGEIVPMEVNFNFDDPNLIILPLAFGKRQGREFIWNDLLSLETGSLKLANGRVIEKTLYNRRTRQDEPALFVALTFERREVLDSSNIKPMNLIGVDRGENIPAVIALTDPEGCPLSRFKDSLGNPTHILRIGESYKEKQRTIQAKKEVEQRRAGGYSRKYASKAKNLADDMVRNTARDLLYYAVTQDAMLIFENLSRGFGRQGKRTFMAERQYTRMEDWLTAKLAYEGLPSKTYLSKTLAQYTSKTCSNCGFTITSADYDRVLEKLKKTATGWMTTINGKELKVEGQITYYNRYKRQNVVKDLSVELDRLSEESVNNDISSWTKGRSGEALSLLKKRFSHRPVQEKFVCLNCGFETHADEQAALNIARSWLFLRSQEYKKYQTNKTTGNTDKRAFVETWQSFYRKKLKEVWKPAV

SEQ ID NO: 49002 - protein, 978 aa, synthetic construct
  REGION 1..978: note = engineered CasX variant
QEIKRINKIRRRLVKDSNTKKAGKTGPMKTLLVRVMTPDLRERLENLRKKPENIPQPISNTSRANLNKLLTDYTEMKKAILHVYWEEFQKDPVGLMSRVAQPASKKIDQNKLKPEMDEKGNLTTAGFACSQCGQPLFVYKLEQVSEKGKAYTNYFGRCNVAEHEKLILLAQLKPEKDSDEAVTYSLGKFGQRALDFYSIHVTKESTHPVKPLAQIAGNRYASGPVGKALRDACMGTIASFLSKYQDIIIEHQKVVKGNQKRLESLRELAGKENLEYPSVTLPPQPHTKEGLDAYNEVIARVRMWVNLNLWQKLKLSRDDAKPLLRLKGFPSFPLVERQANEVDWWDMVCNVKKLINEKKEDGKVFWQNLAGYKRQEALRPYLSSEEDRKKGKKFARYQLGDLLWHLEKKHGEDWGKVYDEAWERIDKKVEGLSKHIKLEEERRSEDAQSKAALTDWLRAKASFVIEGLKEADKDEFCRCELKLQKWYGDLRGKPFAIEAENSILDISGFSKQYNCAFIWQKDGVKKLNLYLIINYFKGGKLRFKKIKPEAFEANRFYTVINKKSGEIVPMEVNFNFDDPNLIILPLAFGKRQGREFIWNDLLSLETGSLKLANGRVIEKTLYNRRTRQDEPALFVALTFERREVLDSSNIKPMNLIGVDRGENIPAVIALTDPEGCPLSRFKDSLGNPTHILRIGESYKEKQRTIQAKKEVEQRRAGGYSRKYASKAKNLADDMVRNTARDLLYYAVTQDAMLIFENLSRGFGRQGKRTFMAERQYTRMEDWLTAKLAYEGLPSKTYLSKTLAQYTSKTCSNCGFTITSADYDRVLEKLKKTATGWMTTINGKELKVEGQITYYNRYKRQNVVKDLSVELDRLSEESVNNDISSWTKGRSGEALSLLKKRFSHRPVQEKFVCLNCGFETHADEQAALNIARSWLFLRSQEYKKYQTNKTTGNTDKRAFVETWQSFYRKKLKEVWKPAV

SEQ ID NO: 49003 - protein, 978 aa, synthetic construct
  REGION 1..978: note = engineered CasX variant
QEIKRINKIRRRLVKDSNTKKAGKTGPMKTLLVRVMTPDLRERLENLRKKPENIPQPISNTSRANLNKLLTDYTEMKKAILHVYWEEFQKDPVGLMSRVAQPASKKIDQNKLKPEMDEKGNLTTAGFACSQCGQPLFVYKLEQVSEKGKAYTNYFGRCNVAEHEKLILLAQLKPEKDSDEAVTYSLGKFGQRALDFYSIHVTKESTHPVKPLAQIAGNRYASGPVGKALRDACMGTIASFLSKYQDIIIEHQKVVKGNQKRLESLRELAGKENLEYPSVTLPPQPHTKEGLDAYNEVIARVRMWVNLNLWQKLKLSRDDAKPLLRLKGFPSFPLVERQANEVDWWDMVCNVKKLINEKKEDGKVFWQNLAGYKRQEALRPYLSSEEDRKKGKKFARYQLGDLLLHLYKKHGEDWGKVYDEAWERIDKKVEGLSKHIKLEEERRSEDAQSKAALTDWLRAKASFVIEGLKEADKDEFCRCELKLQKWYGDLRGKPFAIEAENSILDISGFSKQYNCAFIWQKDGVKKLNLYLIINYFKGGKLRFKKIKPEAFEANRFYTVINKKSGEIVPMEVNFNFDDPNLIILPLAFGKRQGREFIWNDLLSLETGSLKLANGRVIEKTLYNRRTRQDEPALFVALTFERREVLDSSNIKPMNLIGVDRGENIPAVIALTDPEGCPLSRFKDSLGNPTHILRIGESYKEKQRTIQAKKEVEQRRAGGYSRKYASKAKNLADDMVRNTARDLLYYAVTQDAMLIFENLSRGFGRQGKRTFMAERQYTRMEDWLTAKLAYEGLPSKTYLSKTLAQYTSKTCSNCGFTITSADYDRVLEKLKKTATGWMTTINGKELKVEGQITYYNRYKRQNVVKDLSVELDRLSEESVNNDISSWTKGRSGEALSLLKKRFSHRPVQEKFVCLNCGFETHADEQAALNIARSWLFLRSQEYKKYQTNKTTGNTDKRAFVETWQSFYRKKLKEVWKPAV

SEQ ID NO: 49004 - protein, 978 aa, synthetic construct
  REGION 1..978: note = engineered CasX variant
QEIKRINKIRRRLVKDSNTKKAGKTGPMKTLLVRVMTPDLRERLENLRKKPENIPQPISNTSRANLNKLLTDYTEMKKAILHVYWEEFQKDPVGLMSRVAQPASKKIDQNKLKPEMDEKGNLTTAGFACSQCGQPLFVYKLEQVSEKGKAYTNYFGRCNVAEHEKLILLAQLKPEKDSDEAVTYSLGKFGQRALDFYSIHVTKESTHPVKPLAQIAGNRYASGPVGKALRDACMGTIASFLSKYQDIIIEHQKVVKGNQKRLESLRELAGKENLEYPSVTLPPQPHTKEGLDAYNEVIARVRMWVNLNLWQKLKLSRDDAKPLLRLKGFPSFPLVERQANEVDWWDMVCNVKKLINEKKEDGKVFWQNLAGYKRQEALRPYLSSEEDRKKGKKFARYQLGDLLLHLEKKHPEDWGKVYDEAWERIDKKVEGLSKHIKLEEERRSEDAQSKAALTDWLRAKASFVIEGLKEADKDEFCRCELKLQKWYGDLRGKPFAIEAENSILDISGFSKQYNCAFIWQKDGVKKLNLYLIINYFKGGKLRFKKIKPEAFEANRFYTVINKKSGEIVPMEVNFNFDDPNLIILPLAFGKRQGREFIWNDLLSLETGSLKLANGRVIEKTLYNRRTRQDEPALFVALTFERREVLDSSNIKPMNLIGVDRGENIPAVIALTDPEGCPLSRFKDSLGNPTHILRIGESYKEKQRTIQAKKEVEQRRAGGYSRKYASKAKNLADDMVRNTARDLLYYAVTQDAMLIFENLSRGFGRQGKRTFMAERQYTRMEDWLTAKLAYEGLPSKTYLSKTLAQYTSKTCSNCGFTITSADYDRVLEKLKKTATGWMTTINGKELKVEGQITYYNRYKRQNVVKDLSVELDRLSEESVNNDISSWTKGRSGEALSLLKKRFSHRPVQEKFVCLNCGFETHADEQAALNIARSWLFLRSQEYKKYQTNKTTGNTDKRAFVETWQSFYRKKLKEVWKPAV

SEQ ID NO: 49005 - protein, 979 aa, synthetic construct
  REGION 1..979: note = engineered CasX variant
QEIKRINKIRRRLVKDSNTKKAGKTGPMKTLLVRVMTPDLRERLENLRKKPENIPQPISNTSRANLNKLLTDYTEMKKAILHVYWEEFQKDPVGLMSRVAQPASKKIDQNKLKPEMDEKGNLTTAGFACSQCGQPLFVYKLEQVSEKGKAYTNYFGRCNVAEHEKLILLAQLKPEKDSDEAVTYSLGKFGQRALDFYSIHVTKESTHPVKPLAQIAGNRYASGPVGKALRDACMGTIASFLSKYQDIIIEHQKVVKGNQKRLESLRELAGKENLEYPSVTLPPQPHTKEGLDAYNEVIARVRMWVNLNLWQKLKLSRDDAKPLLRLKGFPSFPLVERQANEVDWWDMVCNVKKLINEKKEDGKVFWQNLAGYKRQEALRPYLSSEEDRKKGKKFARYQLGDLLLHLEKKHGERDWGKVYDEAWERIDKKVEGLSKHIKLEEERRSEDAQSKAALTDWLRAKASFVIEGLKEADKDEFCRCELKLQKWYGDLRGKPFAIEAENSILDISGFSKQYNCAFIWQKDGVKKLNLYLIINYFKGGKLRFKKIKPEAFEANRFYTVINKKSGEIVPMEVNFNFDDPNLIILPLAFGKRQGREFIWNDLLSLETGSLKLANGRVIEKTLYNRRTRQDEPALFVALTFERREVLDSSNIKPMNLIGVDRGENIPAVIALTDPEGCPLSRFKDSLGNPTHILRIGESYKEKQRTIQAKKEVEQRRAGGYSRKYASKAKNLADDMVRNTARDLLYYAVTQDAMLIFENLSRGFGRQGKRTFMAERQYTRMEDWLTAKLAYEGLPSKTYLSKTLAQYTSKTCSNCGFTITSADYDRVLEKLKKTATGWMTTINGKELKVEGQITYYNRYKRQNVVKDLSVELDRLSEESVNNDISSWTKGRSGEALSLLKKRFSHRPVQEKFVCLNCGFETHADEQAALNIARSWLFLRSQEYKKYQTNKTTGNTDKRAFVETWQSFYRKKLKEVWKPAV

SEQ ID NO: 49006 - protein, 979 aa, synthetic construct
  REGION 1..979: note = engineered CasX variant
QEIKRINKIRRRLVKDSNTKKAGKTGPMKTLLVRVMTPDLRERLENLRKKPENIPQPISNTSRANLNKLLTDYTEMKKAILHVYWEEFQKDPVGLMSRVAQPASKKIDQNKLKPEMDEKGNLTTAGFACSQCGQPLFVYKLEQVSEKGKAYTNYFGRCNVAEHEKLILLAQLKPEKDSDEAVTYSLGKFGQRALDFYSIHVTKESTHPVKPLAQIAGNRYASGPVGKALRDACMGTIASFLSKYQDIIIEHQKVVKGNQKRLESLRELAGKENLEYPSVTLPPQPHTKEGLDAYNEVIARVRMWVNLNLWQKLKLSRDDAKPLLRLKGFPSFPLVERQANEVDWWDMVCNVKKLINEKKEDGKVFWQNLAGYKRQEALRPYLSSEEDRKKGKKFARYQLGDLLLHLEKKHGEYDWGKVYDEAWERIDKKVEGLSKHIKLEEERRSEDAQSKAALTDWLRAKASFVIEGLKEADKDEFCRCELKLQKWYGDLRGKPFAIEAENSILDISGFSKQYNCAFIWQKDGVKKLNLYLIINYFKGGKLRFKKIKPEAFEANRFYTVINKKSGEIVPMEVNFNFDDPNLIILPLAFGKRQGREFIWNDLLSLETGSLKLANGRVIEKTLYNRRTRQDEPALFVALTFERREVLDSSNIKPMNLIGVDRGENIPAVIALTDPEGCPLSRFKDSLGNPTHILRIGESYKEKQRTIQAKKEVEQRRAGGYSRKYASKAKNLADDMVRNTARDLLYYAVTQDAMLIFENLSRGFGRQGKRTFMAERQYTRMEDWLTAKLAYEGLPSKTYLSKTLAQYTSKTCSNCGFTITSADYDRVLEKLKKTATGWMTTINGKELKVEGQITYYNRYKRQNVVKDLSVELDRLSEESVNNDISSWTKGRSGEALSLLKKRFSHRPVQEKFVCLNCGFETHADEQAALNIARSWLFLRSQEYKKYQTNKTTGNTDKRAFVETWQSFYRKKLKEVWKPAV

SEQ ID NO: 49007 - protein, 978 aa, synthetic construct
  REGION 1..978: note = engineered CasX variant
QEIKRINKIRRRLVKDSNTKKAGKTGPMKTLLVRVMTPDLRERLENLRKKPENIPQPISNTSRANLNKLLTDYTEMKKAILHVYWEEFQKDPVGLMSRVAQPASKKIDQNKLKPEMDEKGNLTTAGFACSQCGQPLFVYKLEQVSEKGKAYTNYFGRCNVAEHEKLILLAQLKPEKDSDEAVTYSLGKFGQRALDFYSIHVTKESTHPVKPLAQIAGNRYASGPVGKALRDACMGTIASFLSKYQDIIIEHQKVVKGNQKRLESLRELAGKENLEYPSVTLPPQPHTKEGLDAYNEVIARVRMWVNLNLWQKLKLSRDDAKPLLRLKGFPSFPLVERQANEVDWWDMVCNVKKLINEKKEDGKVFWQNLAGYKRQEALRPYLSSEEDRKKGKKFARYQLGDLLLHLEKKHGEDWGDVYDEAWERIDKKVEGLSKHIKLEEERRSEDAQSKAALTDWLRAKASFVIEGLKEADKDEFCRCELKLQKWYGDLRGKPFAIEAENSILDISGFSKQYNCAFIWQKDGVKKLNLYLIINYFKGGKLRFKKIKPEAFEANRFYTVINKKSGEIVPMEVNFNFDDPNLIILPLAFGKRQGREFIWNDLLSLETGSLKLANGRVIEKTLYNRRTRQDEPALFVALTFERREVLDSSNIKPMNLIGVDRGENIPAVIALTDPEGCPLSRFKDSLGNPTHILRIGESYKEKQRTIQAKKEVEQRRAGGYSRKYASKAKNLADDMVRNTARDLLYYAVTQDAMLIFENLSRGFGRQGKRTFMAERQYTRMEDWLTAKLAYEGLPSKTYLSKTLAQYTSKTCSNCGFTITSADYDRVLEKLKKTATGWMTTINGKELKVEGQITYYNRYKRQNVVKDLSVELDRLSEESVNNDISSWTKGRSGEALSLLKKRFSHRPVQEKFVCLNCGFETHADEQAALNIARSWLFLRSQEYKKYQTNKTTGNTDKRAFVETWQSFYRKKLKEVWKPAV

SEQ ID NO: 49008 - protein, 978 aa, synthetic construct
  REGION 1..978: note = engineered CasX variant
QEIKRINKIRRRLVKDSNTKKAGKTGPMKTLLVRVMTPDLRERLENLRKKPENIPQPISNTSRANLNKLLTDYTEMKKAILHVYWEEFQKDPVGLMSRVAQPASKKIDQNKLKPEMDEKGNLTTAGFACSQCGQPLFVYKLEQVSEKGKAYTNYFGRCNVAEHEKLILLAQLKPEKDSDEAVTYSLGKFGQRALDFYSIHVTKESTHPVKPLAQIAGNRYASGPVGKALRDACMGTIASFLSKYQDIIIEHQKVVKGNQKRLESLRELAGKENLEYPSVTLPPQPHTKEGLDAYNEVIARVRMWVNLNLWQKLKLSRDDAKPLLRLKGFPSFPLVERQANEVDWWDMVCNVKKLINEKKEDGKVFWQNLAGYKRQEALRPYLSSEEDRKKGKKFARYQLGDLLLHLEKKHGEDWGKVYGEAWERIDKKVEGLSKHIKLEEERRSEDAQSKAALTDWLRAKASFVIEGLKEADKDEFCRCELKLQKWYGDLRGKPFAIEAENSILDISGFSKQYNCAFIWQKDGVKKLNLYLIINYFKGGKLRFKKIKPEAFEANRFYTVINKKSGEIVPMEVNFNFDDPNLIILPLAFGKRQGREFIWNDLLSLETGSLKLANGRVIEKTLYNRRTRQDEPALFVALTFERREVLDSSNIKPMNLIGVDRGENIPAVIALTDPEGCPLSRFKDSLGNPTHILRIGESYKEKQRTIQAKKEVEQRRAGGYSRKYASKAKNLADDMVRNTARDLLYYAVTQDAMLIFENLSRGFGRQGKRTFMAERQYTRMEDWLTAKLAYEGLPSKTYLSKTLAQYTSKTCSNCGFTITSADYDRVLEKLKKTATGWMTTINGKELKVEGQITYYNRYKRQNVVKDLSVELDRLSEESVNNDISSWTKGRSGEALSLLKKRFSHRPVQEKFVCLNCGFETHADEQAALNIARSWLFLRSQEYKKYQTNKTTGNTDKRAFVETWQSFYRKKLKEVWKPAV

SEQ ID NO: 49009 - protein, 978 aa, synthetic construct
  REGION 1..978: note = engineered CasX variant
QEIKRINKIRRRLVKDSNTKKAGKTGPMKTLLVRVMTPDLRERLENLRKKPENIPQPISNTSRANLNKLLTDYTEMKKAILHVYWEEFQKDPVGLMSRVAQPASKKIDQNKLKPEMDEKGNLTTAGFACSQCGQPLFVYKLEQVSEKGKAYTNYFGRCNVAEHEKLILLAQLKPEKDSDEAVTYSLGKFGQRALDFYSIHVTKESTHPVKPLAQIAGNRYASGPVGKALRDACMGTIASFLSKYQDIIIEHQKVVKGNQKRLESLRELAGKENLEYPSVTLPPQPHTKEGLDAYNEVIARVRMWVNLNLWQKLKLSRDDAKPLLRLKGFPSFPLVERQANEVDWWDMVCNVKKLINEKKEDGKVFWQNLAGYKRQEALRPYLSSEEDRKKGKKFARYQLGDLLLHLEKKHGEDWGKVYDEAWERIDKKVEGLSKHIKLEEERRSEDAQSKAALTDWLRAKASFVIEGKKEADKDEFCRCELKLQKWYGDLRGKPFAIEAENSILDISGFSKQYNCAFIWQKDGVKKLNLYLIINYFKGGKLRFKKIKPEAFEANRFYTVINKKSGEIVPMEVNFNFDDPNLIILPLAFGKRQGREFIWNDLLSLETGSLKLANGRVIEKTLYNRRTRQDEPALFVALTFERREVLDSSNIKPMNLIGVDRGENIPAVIALTDPEGCPLSRFKDSLGNPTHILRIGESYKEKQRTIQAKKEVEQRRAGGYSRKYASKAKNLADDMVRNTARDLLYYAVTQDAMLIFENLSRGFGRQGKRTFMAERQYTRMEDWLTAKLAYEGLPSKTYLSKTLAQYTSKTCSNCGFTITSADYDRVLEKLKKTATGWMTTINGKELKVEGQITYYNRYKRQNVVKDLSVELDRLSEESVNNDISSWTKGRSGEALSLLKKRFSHRPVQEKFVCLNCGFETHADEQAALNIARSWLFLRSQEYKKYQTNKTTGNTDKRAFVETWQSFYRKKLKEVWKPAV

SEQ ID NO: 49010 - protein, 978 aa, synthetic construct
  REGION 1..978: note = engineered CasX variant
QEIKRINKIRRRLVKDSNTKKAGKTGPMKTLLVRVMTPDLRERLENLRKKPENIPQPISNTSRANLNKLLTDYTEMKKAILHVYWEEFQKDPVGLMSRVAQPASKKIDQNKLKPEMDEKGNLTTAGFACSQCGQPLFVYKLEQVSEKGKAYTNYFGRCNVAEHEKLILLAQLKPEKDSDEAVTYSLGKFGQRALDFYSIHVTKESTHPVKPLAQIAGNRYASGPVGKALRDACMGTIASFLSKYQDIIIEHQKVVKGNQKRLESLRELAGKENLEYPSVTLPPQPHTKEGLDAYNEVIARVRMWVNLNLWQKLKLSRDDAKPLLRLKGFPSFPLVERQANEVDWWDMVCNVKKLINEKKEDGKVFWQNLAGYKRQEALRPYLSSEEDRKKGKKFARYQLGDLLLHLEKKHGEDWGKVYDEAWERIDKKVEGLSKHIKLEEERRSEDAQSKAALTDWLRAKASFVIEGSKEADKDEFCRCELKLQKWYGDLRGKPFAIEAENSILDISGFSKQYNCAFIWQKDGVKKLNLYLIINYFKGGKLRFKKIKPEAFEANRFYTVINKKSGEIVPMEVNFNFDDPNLIILPLAFGKRQGREFIWNDLLSLETGSLKLANGRVIEKTLYNRRTRQDEPALFVALTFERREVLDSSNIKPMNLIGVDRGENIPAVIALTDPEGCPLSRFKDSLGNPTHILRIGESYKEKQRTIQAKKEVEQRRAGGYSRKYASKAKNLADDMVRNTARDLLYYAVTQDAMLIFENLSRGFGRQGKRTFMAERQYTRMEDWLTAKLAYEGLPSKTYLSKTLAQYTSKTCSNCGFTITSADYDRVLEKLKKTATGWMTTINGKELKVEGQITYYNRYKRQNVVKDLSVELDRLSEESVNNDISSWTKGRSGEALSLLKKRFSHRPVQEKFVCLNCGFETHADEQAALNIARSWLFLRSQEYKKYQTNKTTGNTDKRAFVETWQSFYRKKLKEVWKPAV

SEQ ID NO: 49011 - protein, 979 aa, synthetic construct
  REGION 1..979: note = engineered CasX variant
QEIKRINKIRRRLVKDSNTKKAGKTGPMKTLLVRVMTPDLRERLENLRKKPENIPQPISNTSRANLNKLLTDYTEMKKAILHVYWEEFQKDPVGLMSRVAQPASKKIDQNKLKPEMDEKGNLTTAGFACSQCGQPLFVYKLEQVSEKGKAYTNYFGRCNVAEHEKLILLAQLKPEKDSDEAVTYSLGKFGQRALDFYSIHVTKESTHPVKPLAQIAGNRYASGPVGKALRDACMGTIASFLSKYQDIIIEHQKVVKGNQKRLESLRELAGKENLEYPSVTLPPQPHTKEGLDAYNEVIARVRMWVNLNLWQKLKLSRDDAKPLLRLKGFPSFPLVERQANEVDWWDMVCNVKKLINEKKEDGKVFWQNLAGYKRQEALRPYLSSEEDRKKGKKFARYQLGDLLLHLEKKHGEDWGKVYDEAWERIDKKVEGLSKHIKLEEERRSEDAQSKAALTDWLRAKASFVIEGLKEADDKDEFCRCELKLQKWYGDLRGKPFAIEAENSILDISGFSKQYNCAFIWQKDGVKKLNLYLIINYFKGGKLRFKKIKPEAFEANRFYTVINKKSGEIVPMEVNFNFDDPNLIILPLAFGKRQGREFIWNDLLSLETGSLKLANGRVIEKTLYNRRTRQDEPALFVALTFERREVLDSSNIKPMNLIGVDRGENIPAVIALTDPEGCPLSRFKDSLGNPTHILRIGESYKEKQRTIQAKKEVEQRRAGGYSRKYASKAKNLADDMVRNTARDLLYYAVTQDAMLIFENLSRGFGRQGKRTFMAERQYTRMEDWLTAKLAYEGLPSKTYLSKTLAQYTSKTCSNCGFTITSADYDRVLEKLKKTATGWMTTINGKELKVEGQITYYNRYKRQNVVKDLSVELDRLSEESVNNDISSWTKGRSGEALSLLKKRFSHRPVQEKFVCLNCGFETHADEQAALNIARSWLFLRSQEYKKYQTNKTTGNTDKRAFVETWQSFYRKKLKEVWKPAV

SEQ ID NO: 49012 - protein, 979 aa, synthetic construct
  REGION 1..979: note = engineered CasX variant
QEIKRINKIRRRLVKDSNTKKAGKTGPMKTLLVRVMTPDLRERLENLRKKPENIPQPISNTSRANLNKLLTDYTEMKKAILHVYWEEFQKDPVGLMSRVAQPASKKIDQNKLKPEMDEKGNLTTAGFACSQCGQPLFVYKLEQVSEKGKAYTNYFGRCNVAEHEKLILLAQLKPEKDSDEAVTYSLGKFGQRALDFYSIHVTKESTHPVKPLAQIAGNRYASGPVGKALRDACMGTIASFLSKYQDIIIEHQKVVKGNQKRLESLRELAGKENLEYPSVTLPPQPHTKEGLDAYNEVIARVRMWVNLNLWQKLKLSRDDAKPLLRLKGFPSFPLVERQANEVDWWDMVCNVKKLINEKKEDGKVFWQNLAGYKRQEALRPYLSSEEDRKKGKKFARYQLGDLLLHLEKKHGEDWGKVYDEAWERIDKKVEGLSKHIKLEEERRSEDAQSKAALTDWLRAKASFVIEGLKEADKDEFCRCELKLQKWYGDLRGKPFAIEAENSILDISGFSKQYNCAFIWQKDGVKKLNLYLIINYFKGGKLRFKKIKPEAFEANRFYTVINKKSGEIVPMEVNFNFDDPNLIILPLAFGKRQGREFIWNDLLSLETGSLKLANGRVIEKTLYNRRTRQDEPALFVALTFERREVLDSSNIKPMNLIGVDRGENIPAVIALTDPEGCPLSRFKDSLGNPTHILRIGESYKEKQRTIQAKKEVEQRRAGGYSRKYASKAKNLADDMVRNTARDLLYYAVTQDAMLIFENLSRGFGRQGKRTFMAERQYTRMEDWLTAKLAYEGLPSKTYLSKTLAQYTSKTCSNCGFTITSADYDRVLEKLKKTATGWMTTINGKELKVEGQITYYNRYKRQNVVKDLSVELDRLSEESVNNDISSWTKGRSGNEALSLLKKRFSHRPVQEKFVCLNCGFETHADEQAALNIARSWLFLRSQEYKKYQTNKTTGNTDKRAFVETWQSFYRKKLKEVWKPAV

SEQ ID NO: 49013 - protein, 978 aa, synthetic construct
  REGION 1..978: note = engineered CasX variant
QEIKRINKIRRRLVKDSNTKKAGKTGPMKTLLVRVMTPDLRERLENLRKKPENIPQPISNTSRANLNKLLTDYTEMKKAILHVYWEEFQKDPVGLMSRVAQPASKKIDQNKLKPEMDEKGNLTTAGFACSQCGQPLFVYKLEQVSEKGKAYTNYFGRCNVAEHEKLILLAQLKPEKDSDEAVTYSLGKFGQRALDFYSIHVTKESTHPVKPLAQIAGNRYASGPVGKALRDACMGTIASFLSKYQDIIIEHQKVVKGNQKRLESLRELAGKENLEYPSVTLPPQPHTKEGLDAYNEVIARVRMWVNLNLWQKLKLSRDDAKPLLRLKGFPSFPLVERQANEVDWWDMVCNVKKLINEKKEDGKVFWQNLAGYKRQEALRPYLSSEEDRQKGKKFARYQLGDLLLHLEKKHGEDWGKVYDEAWERIDKKVEGLSKHIKLEEERRSEDAQSKAALTDWLRAKASFVIEGLKEADKDEFCRCELKLQKWYGDLRGKPFAIEAENSILDISGFSKQYNCAFIWQKDGVKKLNLYLIINYFKGGKLRFKKIKPEAFEANRFYTVINKKSGEIVPMEVNFNFDDPNLIILPLAFGKRQGREFIWNDLLSLETGSLKLANGRVIEKTLYNRRTRQDEPALFVALTFERREVLDSSNIKPMNLIGVDRGENIPAVIALTDPEGCPLSRFKDSLGNPTHILRIGESYKEKQRTIQAKKEVEQRRAGGYSRKYASKAKNLADDMVRNTARDLLYYAVTQDAMLIFENLSRGFGRQGKRTFMAERQYTRMEDWLTAKLAYEGLPSKTYLSKTLAQYTSKTCSNCGFTITSADYDRVLEKLKKTATGWMTTINGKELKVEGQITYYNRYKRQNVVKDLSVELDRLSEESVNNDISSWTKGRSGEALSLLKKRFSHRPVQEKFVCLNCGFETHADEQAALNIARSWLFLRSQEYKKYQTNKTTGNTDKRAFVETWQSFYRKKLKEVWKPAV

SEQ ID NO: 49014 - protein, 978 aa, synthetic construct
  REGION 1..978: note = engineered CasX variant
QEIKRINKIRRRLVKDSNTKKAGKTGPMKTLLVRVMTPDLRERLENLRKKPENIPQPISNTSRANLNKLLTDYTEMKKAILHVYWEEFQKDPVGLMSRVAQPASKKIDQNKLKPEMDEKGNLTTAGFACSQCGQPLFVYKLEQVSEKGKAYTNYFGRCNVAEHEKLILLAQLKPEKDSDEAVTYSLGKFGQRALDFYSIHVTKESTHPVKPLAQIAGNRYASGPVGKALRDACMGTIASFLSKYQDIIIEHQKVVKGNQKRLESLRELAGKENLEYPSVTLPPQPHTKEGLDAYNEVIARVRMWVNLNLWQKLKLSRDDAKPLLRLKGFPSFPLVERQANEVDWWDMVCNVKKLINEKKEDGKVFWQNLAGYKRQEALRPYLSSEEDRKKGKKFARYQLGDLLLHLEKKHGEDWGKVYDEAWERIDKKVEGLSKHIKLEEERRSEDAQSKAALTDWLRAKASFVIEGLKEADKDEFCRCELKLQKWYGDLRGKPFAIEAENSILDISGFSKQYNCAFIWQKDGVKKLNLYLIINYFKGGKLRFKKIKPEAFEANRFYTVINKKSGEIVPMEVNFNFDDPNLIILPLAFGKRQGREFIWNDLLSLETGSLKLANGRVIEKTLYNRRTRQDEPALFVALTFERREVLDSSNIKPMNLIGVDRGENIPAVIALTDPEGCPLSRFKDSLGNPTHILRIGESYKEKQRTIQAKKEVEQRRAGGYSRKYASKAKNLADDMVRNTARDLLYYAVTQDAMLIFENLSRGFGRQGKRTFMAERQYTRMEDWLTAKLAYEGLPSQTYLSKTLAQYTSKTCSNCGFTITSADYDRVLEKLKKTATGWMTTINGKELKVEGQITYYNRYKRQNVVKDLSVELDRLSEESVNNDISSWTKGRSGEALSLLKKRFSHRPVQEKFVCLNCGFETHADEQAALNIARSWLFLRSQEYKKYQTNKTTGNTDKRAFVETWQSFYRKKLKEVWKPAV

SEQ ID NO: 49015 - protein, 978 aa, synthetic construct
  REGION 1..978: note = engineered CasX variant
QEIKRINKIRRRLVKDSNTKKAGKTGPMKTLLVRVMTPDLRERLENLRKKPENIPQPISNTSRANLNKLLTDYTEMKKAILHVYWEEFQKDPVGLMSRVAQPASKKIDQNKLKPEMDEKGNLTTAGFACSQCGQPLFVYKLEQVSEKGKAYTNYFGRCNVAEHEKLILLAQLKPEKDSDEAVTYSLGKFGQRALDFYSIHVTKESTHPVKPLAQIAGNRYASGPVGKALRDACMGTIASFLSKYQDIIIEHQKVVKGNQKRLESLRELAGKENLEYPSVTLPPQPHTKEGLDAYNEVIARVRMWVNLNLWQKLKLSRDDAKPLLRLKGFPSFPLVERQANEVDWWDMVCNVKKLINEKKEDGKVFWQNLAGYKRQEALRPYLSSEEDRKKGKKFARYQLGDLLLHLEKKHGEDWGKVYDEAWERIDKKVEGLSKHIKLEEERRSEDAQSKAALTDWLRAKASFVIEGLKEADKDEFCRCELKLQKWYGDLRGKPFAIEAENSILDISGFSKQYNCAFIWQKDGVKKLNLYLIINYFKGGKLRFKKIKPEAFEANRFYTVINKKSGEIVPMEVNFNFDDPNLIILPLAFGKRQGREFIWNDLLSLETGSLKLANGRVIEKTLYNRRTRQDEPALFVALTFERREVLDSSNIKPMNLIGVDRGENIPAVIALTDPEGCPLSRFKDSLGNPTHILRIGESYKEKQRTIQAKKEVEQRRAGGYSRKYASKAKNLADDMVRNTARDLLYYAVTQDAMLIFENLSRGFGRQGKRTFMAERQYTRMEDWLTAKLAYNGLPSKTYLSKTLAQYTSKTCSNCGFTITSADYDRVLEKLKKTATGWMTTINGKELKVEGQITYYNRYKRQNVVKDLSVELDRLSEESVNNDISSWTKGRSGEALSLLKKRFSHRPVQEKFVCLNCGFETHADEQAALNIARSWLFLRSQEYKKYQTNKTTGNTDKRAFVETWQSFYRKKLKEVWKPAV

SEQ ID NO: 49016 - protein, 978 aa, synthetic construct
  REGION 1..978: note = engineered CasX variant
QEIKRINKIRRRLVKDSNTKKAGKTGPMKTLLVRVMTPDLRERLENLRKKPENIPQPISNTSRANLNKLLTDYTEMKKAILHVYWEEFQKDPVGLMSRVAQPASKKIDQNKLKPEMDEKGNLTTAGFACSQCGQPLFVYKLEQVSEKGKAYTNYFGRCNVAEHEKLIQLAQLKPEKDSDEAVTYSLGKFGQRALDFYSIHVTKESTHPVKPLAQIAGNRYASGPVGKALRDACMGTIASFLSKYQDIIIEHQKVVKGNQKRLESLRELAGKENLEYPSVTLPPQPHTKEGLDAYNEVIARVRMWVNLNLWQKLKLSRDDAKPLLRLKGFPSFPLVERQANEVDWWDMVCNVKKLINEKKEDGKVFWQNLAGYKRQEALRPYLSSEEDRKKGKKFARYQLGDLLLHLEKKHGEDWGKVYDEAWERIDKKVEGLSKHIKLEEERRSEDAQSKAALTDWLRAKASFVIEGLKEADKDEFCRCELKLQKWYGDLRGKPFAIEAENSILDISGFSKQYNCAFIWQKDGVKKLNLYLIINYFKGGKLRFKKIKPEAFEANRFYTVINKKSGEIVPMEVNFNFDDPNLIILPLAFGKRQGREFIWNDLLSLETGSLKLANGRVIEKTLYNRRTRQDEPALFVALTFERREVLDSSNIKPMNLIGVDRGENIPAVIALTDPEGCPLSRFKDSLGNPTHILRIGESYKEKQRTIQAKKEVEQRRAGGYSRKYASKAKNLADDMVRNTARDLLYYAVTQDAMLIFENLSRGFGRQGKRTFMAERQYTRMEDWLTAKLAYEGLPSKTYLSKTLAQYTSKTCSNCGFTITSADYDRVLEKLKKTATGWMTTINGKELKVEGQITYYNRYKRQNVVKDLSVELDRLSEESVNNDISSWTKGRSGEALSLLKKRFSHRPVQEKFVCLNCGFETHADEQAALNIARSWLFLRSQEYKKYQTNKTTGNTDKRAFVETWQSFYRKKLKEVWKPAV

SEQ ID NO: 49017 - protein, 978 aa, synthetic construct
  REGION 1..978: note = engineered CasX variant
QEIKRINKIRRRLVKDSNTKKAGKTGPMKTLLVRVMTPDLRERLENLRKKPENIPQPISNTSRANLNKLLTDYTEMKKAILHVYWEEFQKDPVGLMSRVAQPASKKIDQNKLKPEMDEKGNLTTAGFACSQCGQPLFVYKLEQVSEKGKAYTNYFGRCNVAEHEKLILLAQLKPEKDSDEAVTYSLGKFGQRALDFYSIHVTKESTHPVKPLAQIAGNRYASGPVGKALRDACMGTIASFLSKYQDIIIEHQKVVKGNQKRLESLRELAGKENLEYPSVTLPPQPHTKEGLDAYNEVIARVRMWVNLNLWQKLKLSRDDAKPLLRLKGFPSFPLVERQANEVDWWDMVCNVKKLINEKKEDGKVFWQNLAIYKRQEALRPYLSSEEDRKKGKKFARYQLGDLLLHLEKKHGEDWGKVYDEAWERIDKKVEGLSKHIKLEEERRSEDAQSKAALTDWLRAKASFVIEGLKEADKDEFCRCELKLQKWYGDLRGKPFAIEAENSILDISGFSKQYNCAFIWQKDGVKKLNLYLIINYFKGGKLRFKKIKPEAFEANRFYTVINKKSGEIVPMEVNFNFDDPNLIILPLAFGKRQGREFIWNDLLSLETGSLKLANGRVIEKTLYNRRTRQDEPALFVALTFERREVLDSSNIKPMNLIGVDRGENIPAVIALTDPEGCPLSRFKDSLGNPTHILRIGESYKEKQRTIQAKKEVEQRRAGGYSRKYASKAKNLADDMVRNTARDLLYYAVTQDAMLIFENLSRGFGRQGKRTFMAERQYTRMEDWLTAKLAYEGLPSKTYLSKTLAQYTSKTCSNCGFTITSADYDRVLEKLKKTATGWMTTINGKELKVEGQITYYNRYKRQNVVKDLSVELDRLSEESVNNDISSWTKGRSGEALSLLKKRFSHRPVQEKFVCLNCGFETHADEQAALNIARSWLFLRSQEYKKYQTNKTTGNTDKRAFVETWQSFYRKKLKEVWKPAV

SEQ ID NO: 49018 - protein, 978 aa, synthetic construct
  REGION 1..978: note = engineered CasX variant
QEIKRINKIRRRLVKDSNTKKAGKTGPMKTLLVRVMTPDLRERLENLRKKPENIPQPISNTSRANLNKLLTDYTEMKKAILHVYWEEFQKDPVGLMSRVAQPASKKIDQNKLKPEMDEKGNLTTAGFACSQCGQPLFVYKLEQVSEKGKAYTNYFGRCNVAEHEKLILLAQLKPEKDSDEAVTYSLGKFGQRALDFYSIHVTKESTHPVKPLAQIAGNRYASGPVGKALRDACMGTIASFLSKYQDIIIEHQKVVKGNQKRLESLRELAGKENLEYPSVTLPPQPHTKEGLDAYNEVIARVRMWVNLNLWQKLKLSRDDAKPLLRLKGFPSFPLVERQANEVDWWDMVCNVKKLINEKKEDGKVFWQNLAGYKRQEALRPYLSSEEDREKGKKFARYQLGDLLLHLEKKHGEDWGKVYDEAWERIDKKVEGLSKHIKLEEERRSEDAQSKAALTDWLRAKASFVIEGLKEADKDEFCRCELKLQKWYGDLRGKPFAIEAENSILDISGFSKQYNCAFIWQKDGVKKLNLYLIINYFKGGKLRFKKIKPEAFEANRFYTVINKKSGEIVPMEVNFNFDDPNLIILPLAFGKRQGREFIWNDLLSLETGSLKLANGRVIEKTLYNRRTRQDEPALFVALTFERREVLDSSNIKPMNLIGVDRGENIPAVIALTDPEGCPLSRFKDSLGNPTHILRIGESYKEKQRTIQAKKEVEQRRAGGYSRKYASKAKNLADDMVRNTARDLLYYAVTQDAMLIFENLSRGFGRQGKRTFMAERQYTRMEDWLTAKLAYEGLPSKTYLSKTLAQYTSKTCSNCGFTITSADYDRVLEKLKKTATGWMTTINGKELKVEGQITYYNRYKRQNVVKDLSVELDRLSEESVNNDISSWTKGRSGEALSLLKKRFSHRPVQEKFVCLNCGFETHADEQAALNIARSWLFLRSQEYKKYQTNKTTGNTDKRAFVETWQSFYRKKLKEVWKPAV

SEQ ID NO: 49019 - protein, 978 aa, synthetic construct
  REGION 1..978: note = engineered CasX variant
QEIKRINKIRRRLVKDSNTKKAGKTGPMKTLLVRVMTPDLRERLENLRKKPENIPQPISNTSRANLNKLLTDYTEMKKAILHVYWEEFQKDPVGLMSRVAQPASKKIDQNKLKPEMDEKGNLTTAGFACSQCGQPLFVYKLEQVSEKGKAYTNYFGRCNVAEHEKLILLAQLKPEKDSDEAVTYSLGKFGQRALDFYSIHVTKESTHPVKPLAQIAGNRYASGPVGKALRDACMGTIASFLSKYQDIIIEHQKVVKGNQKRLESLRELAGKENLEYPSVTLPPQPHTKEGLDAYNEVIARVRMWVNLNLWQKLKLSRDDAKPLLRLKGFPSFPLVERQANEVDWWDMVCNVKKLINEKKEDGKVFWQNLAGYKRQEALRPYLSSEEDRKKGKKFARYQLGDLLLHLEKKHGEDWGKVYDEAWERIDKKVEGLSKHIKLEEERRSEDAQSKAALTDWLRAKASFVIEGLKEADKDEFCRCELKLQKWYGDLRGKPFAIEAENSILDISGFSKQYNCAFIWQKDGVKKLNLYLIINYFKGGKLRFKKIKPEAFEANRFYTVINKKSGEIVIMEVNFNFDDPNLIILPLAFGKRQGREFIWNDLLSLETGSLKLANGRVIEKTLYNRRTRQDEPALFVALTFERREVLDSSNIKPMNLIGVDRGENIPAVIALTDPEGCPLSRFKDSLGNPTHILRIGESYKEKQRTIQAKKEVEQRRAGGYSRKYASKAKNLADDMVRNTARDLLYYAVTQDAMLIFENLSRGFGRQGKRTFMAERQYTRMEDWLTAKLAYEGLPSKTYLSKTLAQYTSKTCSNCGFTITSADYDRVLEKLKKTATGWMTTINGKELKVEGQITYYNRYKRQNVVKDLSVELDRLSEESVNNDISSWTKGRSGEALSLLKKRFSHRPVQEKFVCLNCGFETHADEQAALNIARSWLFLRSQEYKKYQTNKTTGNTDKRAFVETWQSFYRKKLKEVWKPAV

SEQ ID NO: 49020 - protein, 978 aa, synthetic construct
  REGION 1..978: note = engineered CasX variant
QEIKRINKIRRRLVKDSNTKKAGKTGPMKTLLVRVMTPDLRERLENLRKKPENIPQPISNTSRANLNKLLTDYTEMKKAILHVYWEEFQKDPVGLMSRVAQPASKKIDQNKLKPEMDEKGNLTTAGFACSQCGQPLFVYKLEQVSEKGKAYTNYFGRCNVAEHEKLILLAQLKPEKDSDEAVTYSLGKFGQRALDFYSIHVTKESTHPVKPLAQIAGNRYASGPVGKALRGACMGTIASFLSKYQDIIIEHQKVVKGNQKRLESLRELAGKENLEYPSVTLPPQPHTKEGVDAYNEVIARVRTWVNLNLWQKLKLSRDDAKPLLRLKGFPSFPLVERQANEVDWWDMVCNVKKLINEKKEDGKVFWQNLAGYKRQEALRPYLSSEEDRKKGKKFARYQLGDLLLHLEKKHGEDWGKVYDEAWERIDKKVEGLSKHIKLEEERRSEDAQSKAALTDWLRAKASFVIEGLKEADKDEFCRCELKLQKWYGDLRGKPFAIEAENSILDISGFSKQYNCAFIWQKDGVKKLNLYLIINYFKGGKLRFKKIKPEAFEANRFYTVINKKSGEIVPMEVNFNFDDPNLIILPLAFGKRQGREFIWNDLLSLETGSLKLANGRVIEKTLYNRRTRQDEPALFVALTFERREVLDSSNIKPMNLIGVDRGENIPAVIALTDPEGCPLSRFKDSLGNPTHILRIGESYKEKQRTIQAKKEVEQRRAGGYSRKYASKAKNLADDMVRNTARDLLYYAVTQDAMLIFENLSRGFGRQGKRTFMAERQYTRMEDWLTAKLAYEGLPSKTYLSKTLAQYTSKTCSNCGFTITSADYDRVLEKLKKTATGWMTTINGKELKVEGQITYYNRYKRQNVVKDLSVELDRLSEESVNNDISSWTKGRSGEALSLLKKRFSHRPVQEKFVCLNCGFETHADEQAALNIARSWLFLRSQEYKKYQTNKTTGNTDKRAFVETWQSFYRKKLKEVWKPAV

SEQ ID NO: 49021 - protein, 978 aa, synthetic construct
  REGION 1..978: note = engineered CasX variant
QEIKRINKIRRRLVKDSNTKKAGKTGPMKTLLVRVMTPDLRERLENLRKKPENIPQPISNTSRANLNKLLTDYTEMKKAILHVYWEEFQKDPVGLMSRVAQPASKKIDQNKLKPEMDEKGNLTTAGFACSQCGQPLFVYKLEQVSEKGKAYTNYFGRCNVAEHEKLILLAQLKPEKDSDEAVTYSLGKFGQRALDFYSIHVTKESTHPVKPLAQIAGNRYASGPVGKALRDACMGTIASFLSKYQDIIIEHQKVVKGNQKRLESLRELAGKENLEYPSVTLPPQPHTKEGVDAYNEVIARVRTWVNLNLWQKLKLSRDDAKPLLRLKNFPSFPLVERQANEVDWWDMVCNVKKLINEKKEDGKVFWQNLAGYKRQEALRPYLSSEEDRKKGKKFARYQLGDLLLHLEKKHGEDWGKVYDEAWERIDKKVEGLSKHIKLEEERRSEDAQSKAALTDWLRAKASFVIEGLKEADKDEFCRCELKLQKWYGDLRGKPFAIEAENSILDISGFSKQYNCAFIWQKDGVKKLNLYLIINYFKGGKLRFKKIKPEAFEANRFYTVINKKSGEIVPMEVNFNFDDPNLIILPLAFGKRQGREFIWNDLLSLETGSLKLANGRVIEKTLYNRRTRQDEPALFVALTFERREVLDSSNIKPMNLIGVDRGENIPAVIALTDPEGCPLSRFKDSLGNPTHILRIGESYKEKQRTIQAKKEVEQRRAGGYSRKYASKAKNLADDMVRNTARDLLYYAVTQDAMLIFENLSRGFGRQGKRTFMAERQYTRMEDWLTAKLAYEGLPSKTYLSKTLAQYTSKTCSNCGFTITSADYDRVLEKLKKTATGWMTTINGKELKVEGQITYYNRYKRQNVVKDLSVELDRLSEESVNNDISSWTKGRSGEALSLLKKRFSHRPVQEKFVCLNCGFETHADEQAALNIARSWLFLRSQEYKKYQTNKTTGNTDKRAFVETWQSFYRKKLKEVWKPAV

SEQ ID NO: 49022 - protein, 978 aa, synthetic construct
  REGION 1..978: note = engineered CasX variant
QEIKRINKIRRRLVKDSNTKKAGKTGPMKTLLVRVMTPDLRERLENLRKKPENIPQPISNTSRANLNKLLTDYTEMKKAILHVYWEEFQKDPVGLMSRVAQPASKKIDQNKLKPEMDEKGNLTTAGFACSQCGQPLFVYKLEQVSEKGKAYTNYFGRCNVAEHEKLILLAQLKPEKDSDEAVTYSLGKFGQRALDFYSIHVTKESTHPVKPLAQIAGNRYASGPVGKALRDACMGTIASFLSKYQDIIIEHQKVVKGNQKRLESLRELAGKENLEYPSVTLPPQPHTKEGVDAYNEVIARVRTWVNLNLWQKLKLSRDDAKPLLRLKGFPSFPLVERQANEVDWWDMVCNVKKLINEKKEDGKVFWQNLAGYKRQEALRPYLSSEEDRKKGKKFARYQLGDLLNHLEKKHGEDWGKVYDEAWERIDKKVEGLSKHIKLEEERRSEDAQSKAALTDWLRAKASFVIEGLKEADKDEFCRCELKLQKWYGDLRGKPFAIEAENSILDISGFSKQYNCAFIWQKDGVKKLNLYLIINYFKGGKLRFKKIKPEAFEANRFYTVINKKSGEIVPMEVNFNFDDPNLIILPLAFGKRQGREFIWNDLLSLETGSLKLANGRVIEKTLYNRRTRQDEPALFVALTFERREVLDSSNIKPMNLIGVDRGENIPAVIALTDPEGCPLSRFKDSLGNPTHILRIGESYKEKQRTIQAKKEVEQRRAGGYSRKYASKAKNLADDMVRNTARDLLYYAVTQDAMLIFENLSRGFGRQGKRTFMAERQYTRMEDWLTAKLAYEGLPSKTYLSKTLAQYTSKTCSNCGFTITSADYDRVLEKLKKTATGWMTTINGKELKVEGQITYYNRYKRQNVVKDLSVELDRLSEESVNNDISSWTKGRSGEALSLLKKRFSHRPVQEKFVCLNCGFETHADEQAALNIARSWLFLRSQEYKKYQTNKTTGNTDKRAFVETWQSFYRKKLKEVWKPAV

SEQ ID NO: 49023 - protein, 978 aa, synthetic construct
  REGION 1..978: note = engineered CasX variant
QEIKRINKIRRRLVKDSNTKKAGKTGPMKTLLVRVMTPDLRERLENLRKKPENIPQPISNTSRANLNKLLTDYTEMKKAILHVYWEEFQKDPVGLMSRVAQPASKKIDQNKLKPEMDEKGNLTTAGFACSQCGQPLFVYKLEQVSEKGKAYTNYFGRCNVAEHEKLILLAQLKPEKDSDEAVTYSLGKFGQRALDFYSIHVTKESTHPVKPLAQIAGNRYASGPVGKALRDACMGTIASFLSKYQDIIIEHQKVVKGNQKRLESLRELAGKENLEYPSVTLPPQPHTKEGVDAYNEVIARVRTWVNLNLWQKLKLSRDDAKPLLRLKGFPSFPLVERQANEVDWWDMVCNVKKLINEKKEDGKVFWQNLAGYKRQEALRPYLSSEEDRKKGKKFARYQLGDLLWHLEKKHGEDWGKVYDEAWERIDKKVEGLSKHIKLEEERRSEDAQSKAALTDWLRAKASFVIEGLKEADKDEFCRCELKLQKWYGDLRGKPFAIEAENSILDISGFSKQYNCAFIWQKDGVKKLNLYLIINYFKGGKLRFKKIKPEAFEANRFYTVINKKSGEIVPMEVNFNFDDPNLIILPLAFGKRQGREFIWNDLLSLETGSLKLANGRVIEKTLYNRRTRQDEPALFVALTFERREVLDSSNIKPMNLIGVDRGENIPAVIALTDPEGCPLSRFKDSLGNPTHILRIGESYKEKQRTIQAKKEVEQRRAGGYSRKYASKAKNLADDMVRNTARDLLYYAVTQDAMLIFENLSRGFGRQGKRTFMAERQYTRMEDWLTAKLAYEGLPSKTYLSKTLAQYTSKTCSNCGFTITSADYDRVLEKLKKTATGWMTTINGKELKVEGQITYYNRYKRQNVVKDLSVELDRLSEESVNNDISSWTKGRSGEALSLLKKRFSHRPVQEKFVCLNCGFETHADEQAALNIARSWLFLRSQEYKKYQTNKTTGNTDKRAFVETWQSFYRKKLKEVWKPAV

SEQ ID NO: 49024 - protein, 978 aa, synthetic construct
  REGION 1..978: note = engineered CasX variant
QEIKRINKIRRRLVKDSNTKKAGKTGPMKTLLVRVMTPDLRERLENLRKKPENIPQPISNTSRANLNKLLTDYTEMKKAILHVYWEEFQKDPVGLMSRVAQPASKKIDQNKLKPEMDEKGNLTTAGFACSQCGQPLFVYKLEQVSEKGKAYTNYFGRCNVAEHEKLILLAQLKPEKDSDEAVTYSLGKFGQRALDFYSIHVTKESTHPVKPLAQIAGNRYASGPVGKALRDACMGTIASFLSKYQDIIIEHQKVVKGNQKRLESLRELAGKENLEYPSVTLPPQPHTKEGVDAYNEVIARVRTWVNLNLWQKLKLSRDDAKPLLRLKGFPSFPLVERQANEVDWWDMVCNVKKLINEKKEDGKVFWQNLAGYKRQEALRPYLSSEEDRKKGKKFARYQLGDLLLHLYKKHGEDWGKVYDEAWERIDKKVEGLSKHIKLEEERRSEDAQSKAALTDWLRAKASFVIEGLKEADKDEFCRCELKLQKWYGDLRGKPFAIEAENSILDISGFSKQYNCAFIWQKDGVKKLNLYLIINYFKGGKLRFKKIKPEAFEANRFYTVINKKSGEIVPMEVNFNFDDPNLIILPLAFGKRQGREFIWNDLLSLETGSLKLANGRVIEKTLYNRRTRQDEPALFVALTFERREVLDSSNIKPMNLIGVDRGENIPAVIALTDPEGCPLSRFKDSLGNPTHILRIGESYKEKQRTIQAKKEVEQRRAGGYSRKYASKAKNLADDMVRNTARDLLYYAVTQDAMLIFENLSRGFGRQGKRTFMAERQYTRMEDWLTAKLAYEGLPSKTYLSKTLAQYTSKTCSNCGFTITSADYDRVLEKLKKTATGWMTTINGKELKVEGQITYYNRYKRQNVVKDLSVELDRLSEESVNNDISSWTKGRSGEALSLLKKRFSHRPVQEKFVCLNCGFETHADEQAALNIARSWLFLRSQEYKKYQTNKTTGNTDKRAFVETWQSFYRKKLKEVWKPAV

SEQ ID NO: 49025 - protein, 978 aa, synthetic construct
  REGION 1..978: note = engineered CasX variant
QEIKRINKIRRRLVKDSNTKKAGKTGPMKTLLVRVMTPDLRERLENLRKKPENIPQPISNTSRANLNKLLTDYTEMKKAILHVYWEEFQKDPVGLMSRVAQPASKKIDQNKLKPEMDEKGNLTTAGFACSQCGQPLFVYKLEQVSEKGKAYTNYFGRCNVAEHEKLILLAQLKPEKDSDEAVTYSLGKFGQRALDFYSIHVTKESTHPVKPLAQIAGNRYASGPVGKALRDACMGTIASFLSKYQDIIIEHQKVVKGNQKRLESLRELAGKENLEYPSVTLPPQPHTKEGVDAYNEVIARVRTWVNLNLWQKLKLSRDDAKPLLRLKGFPSFPLVERQANEVDWWDMVCNVKKLINEKKEDGKVFWQNLAGYKRQEALRPYLSSEEDRKKGKKFARYQLGDLLLHLEKKHPEDWGKVYDEAWERIDKKVEGLSKHIKLEEERRSEDAQSKAALTDWLRAKASFVIEGLKEADKDEFCRCELKLQKWYGDLRGKPFAIEAENSILDISGFSKQYNCAFIWQKDGVKKLNLYLIINYFKGGKLRFKKIKPEAFEANRFYTVINKKSGEIVPMEVNFNFDDPNLIILPLAFGKRQGREFIWNDLLSLETGSLKLANGRVIEKTLYNRRTRQDEPALFVALTFERREVLDSSNIKPMNLIGVDRGENIPAVIALTDPEGCPLSRFKDSLGNPTHILRIGESYKEKQRTIQAKKEVEQRRAGGYSRKYASKAKNLADDMVRNTARDLLYYAVTQDAMLIFENLSRGFGRQGKRTFMAERQYTRMEDWLTAKLAYEGLPSKTYLSKTLAQYTSKTCSNCGFTITSADYDRVLEKLKKTATGWMTTINGKELKVEGQITYYNRYKRQNVVKDLSVELDRLSEESVNNDISSWTKGRSGEALSLLKKRFSHRPVQEKFVCLNCGFETHADEQAALNIARSWLFLRSQEYKKYQTNKTTGNTDKRAFVETWQSFYRKKLKEVWKPAV

SEQ ID NO: 49026 - protein, 979 aa, synthetic construct
  REGION 1..979: note = engineered CasX variant
QEIKRINKIRRRLVKDSNTKKAGKTGPMKTLLVRVMTPDLRERLENLRKKPENIPQPISNTSRANLNKLLTDYTEMKKAILHVYWEEFQKDPVGLMSRVAQPASKKIDQNKLKPEMDEKGNLTTAGFACSQCGQPLFVYKLEQVSEKGKAYTNYFGRCNVAEHEKLILLAQLKPEKDSDEAVTYSLGKFGQRALDFYSIHVTKESTHPVKPLAQIAGNRYASGPVGKALRDACMGTIASFLSKYQDIIIEHQKVVKGNQKRLESLRELAGKENLEYPSVTLPPQPHTKEGVDAYNEVIARVRTWVNLNLWQKLKLSRDDAKPLLRLKGFPSFPLVERQANEVDWWDMVCNVKKLINEKKEDGKVFWQNLAGYKRQEALRPYLSSEEDRKKGKKFARYQLGDLLLHLEKKHGERDWGKVYDEAWERIDKKVEGLSKHIKLEEERRSEDAQSKAALTDWLRAKASFVIEGLKEADKDEFCRCELKLQKWYGDLRGKPFAIEAENSILDISGFSKQYNCAFIWQKDGVKKLNLYLIINYFKGGKLRFKKIKPEAFEANRFYTVINKKSGEIVPMEVNFNFDDPNLIILPLAFGKRQGREFIWNDLLSLETGSLKLANGRVIEKTLYNRRTRQDEPALFVALTFERREVLDSSNIKPMNLIGVDRGENIPAVIALTDPEGCPLSRFKDSLGNPTHILRIGESYKEKQRTIQAKKEVEQRRAGGYSRKYASKAKNLADDMVRNTARDLLYYAVTQDAMLIFENLSRGFGRQGKRTFMAERQYTRMEDWLTAKLAYEGLPSKTYLSKTLAQYTSKTCSNCGFTITSADYDRVLEKLKKTATGWMTTINGKELKVEGQITYYNRYKRQNVVKDLSVELDRLSEESVNNDISSWTKGRSGEALSLLKKRFSHRPVQEKFVCLNCGFETHADEQAALNIARSWLFLRSQEYKKYQTNKTTGNTDKRAFVETWQSFYRKKLKEVWKPAV

SEQ ID NO: 49027 - protein, 979 aa, synthetic construct
  REGION 1..979: note = engineered CasX variant
QEIKRINKIRRRLVKDSNTKKAGKTGPMKTLLVRVMTPDLRERLENLRKKPENIPQPISNTSRANLNKLLTDYTEMKKAILHVYWEEFQKDPVGLMSRVAQPASKKIDQNKLKPEMDEKGNLTTAGFACSQCGQPLFVYKLEQVSEKGKAYTNYFGRCNVAEHEKLILLAQLKPEKDSDEAVTYSLGKFGQRALDFYSIHVTKESTHPVKPLAQIAGNRYASGPVGKALRDACMGTIASFLSKYQDIIIEHQKVVKGNQKRLESLRELAGKENLEYPSVTLPPQPHTKEGVDAYNEVIARVRTWVNLNLWQKLKLSRDDAKPLLRLKGFPSFPLVERQANEVDWWDMVCNVKKLINEKKEDGKVFWQNLAGYKRQEALRPYLSSEEDRKKGKKFARYQLGDLLLHLEKKHGEYDWGKVYDEAWERIDKKVEGLSKHIKLEEERRSEDAQSKAALTDWLRAKASFVIEGLKEADKDEFCRCELKLQKWYGDLRGKPFAIEAENSILDISGFSKQYNCAFIWQKDGVKKLNLYLIINYFKGGKLRFKKIKPEAFEANRFYTVINKKSGEIVPMEVNFNFDDPNLIILPLAFGKRQGREFIWNDLLSLETGSLKLANGRVIEKTLYNRRTRQDEPALFVALTFERREVLDSSNIKPMNLIGVDRGENIPAVIALTDPEGCPLSRFKDSLGNPTHILRIGESYKEKQRTIQAKKEVEQRRAGGYSRKYASKAKNLADDMVRNTARDLLYYAVTQDAMLIFENLSRGFGRQGKRTFMAERQYTRMEDWLTAKLAYEGLPSKTYLSKTLAQYTSKTCSNCGFTITSADYDRVLEKLKKTATGWMTTINGKELKVEGQITYYNRYKRQNVVKDLSVELDRLSEESVNNDISSWTKGRSGEALSLLKKRFSHRPVQEKFVCLNCGFETHADEQAALNIARSWLFLRSQEYKKYQTNKTTGNTDKRAFVETWQSFYRKKLKEVWKPAV

SEQ ID NO: 49028 - protein, 978 aa, synthetic construct
  REGION 1..978: note = engineered CasX variant
QEIKRINKIRRRLVKDSNTKKAGKTGPMKTLLVRVMTPDLRERLENLRKKPENIPQPISNTSRANLNKLLTDYTEMKKAILHVYWEEFQKDPVGLMSRVAQPASKKIDQNKLKPEMDEKGNLTTAGFACSQCGQPLFVYKLEQVSEKGKAYTNYFGRCNVAEHEKLILLAQLKPEKDSDEAVTYSLGKFGQRALDFYSIHVTKESTHPVKPLAQIAGNRYASGPVGKALRDACMGTIASFLSKYQDIIIEHQKVVKGNQKRLESLRELAGKENLEYPSVTLPPQPHTKEGVDAYNEVIARVRTWVNLNLWQKLKLSRDDAKPLLRLKGFPSFPLVERQANEVDWWDMVCNVKKLINEKKEDGKVFWQNLAGYKRQEALRPYLSSEEDRKKGKKFARYQLGDLLLHLEKKHGEDWGDVYDEAWERIDKKVEGLSKHIKLEEERRSEDAQSKAALTDWLRAKASFVIEGLKEADKDEFCRCELKLQKWYGDLRGKPFAIEAENSILDISGFSKQYNCAFIWQKDGVKKLNLYLIINYFKGGKLRFKKIKPEAFEANRFYTVINKKSGEIVPMEVNFNFDDPNLIILPLAFGKRQGREFIWNDLLSLETGSLKLANGRVIEKTLYNRRTRQDEPALFVALTFERREVLDSSNIKPMNLIGVDRGENIPAVIALTDPEGCPLSRFKDSLGNPTHILRIGESYKEKQRTIQAKKEVEQRRAGGYSRKYASKAKNLADDMVRNTARDLLYYAVTQDAMLIFENLSRGFGRQGKRTFMAERQYTRMEDWLTAKLAYEGLPSKTYLSKTLAQYTSKTCSNCGFTITSADYDRVLEKLKKTATGWMTTINGKELKVEGQITYYNRYKRQNVVKDLSVELDRLSEESVNNDISSWTKGRSGEALSLLKKRFSHRPVQEKFVCLNCGFETHADEQAALNIARSWLFLRSQEYKKYQTNKTTGNTDKRAFVETWQSFYRKKLKEVWKPAV

SEQ ID NO: 49029 - protein, 978 aa, synthetic construct
  REGION 1..978: note = engineered CasX variant
QEIKRINKIRRRLVKDSNTKKAGKTGPMKTLLVRVMTPDLRERLENLRKKPENIPQPISNTSRANLNKLLTDYTEMKKAILHVYWEEFQKDPVGLMSRVAQPASKKIDQNKLKPEMDEKGNLTTAGFACSQCGQPLFVYKLEQVSEKGKAYTNYFGRCNVAEHEKLILLAQLKPEKDSDEAVTYSLGKFGQRALDFYSIHVTKESTHPVKPLAQIAGNRYASGPVGKALRDACMGTIASFLSKYQDIIIEHQKVVKGNQKRLESLRELAGKENLEYPSVTLPPQPHTKEGVDAYNEVIARVRTWVNLNLWQKLKLSRDDAKPLLRLKGFPSFPLVERQANEVDWWDMVCNVKKLINEKKEDGKVFWQNLAGYKRQEALRPYLSSEEDRKKGKKFARYQLGDLLLHLEKKHGEDWGKVYGEAWERIDKKVEGLSKHIKLEEERRSEDAQSKAALTDWLRAKASFVIEGLKEADKDEFCRCELKLQKWYGDLRGKPFAIEAENSILDISGFSKQYNCAFIWQKDGVKKLNLYLIINYFKGGKLRFKKIKPEAFEANRFYTVINKKSGEIVPMEVNFNFDDPNLIILPLAFGKRQGREFIWNDLLSLETGSLKLANGRVIEKTLYNRRTRQDEPALFVALTFERREVLDSSNIKPMNLIGVDRGENIPAVIALTDPEGCPLSRFKDSLGNPTHILRIGESYKEKQRTIQAKKEVEQRRAGGYSRKYASKAKNLADDMVRNTARDLLYYAVTQDAMLIFENLSRGFGRQGKRTFMAERQYTRMEDWLTAKLAYEGLPSKTYLSKTLAQYTSKTCSNCGFTITSADYDRVLEKLKKTATGWMTTINGKELKVEGQITYYNRYKRQNVVKDLSVELDRLSEESVNNDISSWTKGRSGEALSLLKKRFSHRPVQEKFVCLNCGFETHADEQAALNIARSWLFLRSQEYKKYQTNKTTGNTDKRAFVETWQSFYRKKLKEVWKPAV

SEQ ID NO: 49030 - protein, 978 aa, synthetic construct
  REGION 1..978: note = engineered CasX variant
QEIKRINKIRRRLVKDSNTKKAGKTGPMKTLLVRVMTPDLRERLENLRKKPENIPQPISNTSRANLNKLLTDYTEMKKAILHVYWEEFQKDPVGLMSRVAQPASKKIDQNKLKPEMDEKGNLTTAGFACSQCGQPLFVYKLEQVSEKGKAYTNYFGRCNVAEHEKLILLAQLKPEKDSDEAVTYSLGKFGQRALDFYSIHVTKESTHPVKPLAQIAGNRYASGPVGKALRDACMGTIASFLSKYQDIIIEHQKVVKGNQKRLESLRELAGKENLEYPSVTLPPQPHTKEGVDAYNEVIARVRTWVNLNLWQKLKLSRDDAKPLLRLKGFPSFPLVERQANEVDWWDMVCNVKKLINEKKEDGKVFWQNLAGYKRQEALRPYLSSEEDRKKGKKFARYQLGDLLLHLEKKHGEDWGKVYDEAWERIDKKVEGLSKHIKLEEERRSEDAQSKAALTDWLRAKASFVIEGKKEADKDEFCRCELKLQKWYGDLRGKPFAIEAENSILDISGFSKQYNCAFIWQKDGVKKLNLYLIINYFKGGKLRFKKIKPEAFEANRFYTVINKKSGEIVPMEVNFNFDDPNLIILPLAFGKRQGREFIWNDLLSLETGSLKLANGRVIEKTLYNRRTRQDEPALFVALTFERREVLDSSNIKPMNLIGVDRGENIPAVIALTDPEGCPLSRFKDSLGNPTHILRIGESYKEKQRTIQAKKEVEQRRAGGYSRKYASKAKNLADDMVRNTARDLLYYAVTQDAMLIFENLSRGFGRQGKRTFMAERQYTRMEDWLTAKLAYEGLPSKTYLSKTLAQYTSKTCSNCGFTITSADYDRVLEKLKKTATGWMTTINGKELKVEGQITYYNRYKRQNVVKDLSVELDRLSEESVNNDISSWTKGRSGEALSLLKKRFSHRPVQEKFVCLNCGFETHADEQAALNIARSWLFLRSQEYKKYQTNKTTGNTDKRAFVETWQSFYRKKLKEVWKPAV

SEQ ID NO: 49031 - protein, 978 aa, synthetic construct
  REGION 1..978: note = engineered CasX variant
QEIKRINKIRRRLVKDSNTKKAGKTGPMKTLLVRVMTPDLRERLENLRKKPENIPQPISNTSRANLNKLLTDYTEMKKAILHVYWEEFQKDPVGLMSRVAQPASKKIDQNKLKPEMDEKGNLTTAGFACSQCGQPLFVYKLEQVSEKGKAYTNYFGRCNVAEHEKLILLAQLKPEKDSDEAVTYSLGKFGQRALDFYSIHVTKESTHPVKPLAQIAGNRYASGPVGKALRDACMGTIASFLSKYQDIIIEHQKVVKGNQKRLESLRELAGKENLEYPSVTLPPQPHTKEGVDAYNEVIARVRTWVNLNLWQKLKLSRDDAKPLLRLKGFPSFPLVERQANEVDWWDMVCNVKKLINEKKEDGKVFWQNLAGYKRQEALRPYLSSEEDRKKGKKFARYQLGDLLLHLEKKHGEDWGKVYDEAWERIDKKVEGLSKHIKLEEERRSEDAQSKAALTDWLRAKASFVIEGSKEADKDEFCRCELKLQKWYGDLRGKPFAIEAENSILDISGFSKQYNCAFIWQKDGVKKLNLYLIINYFKGGKLRFKKIKPEAFEANRFYTVINKKSGEIVPMEVNFNFDDPNLIILPLAFGKRQGREFIWNDLLSLETGSLKLANGRVIEKTLYNRRTRQDEPALFVALTFERREVLDSSNIKPMNLIGVDRGENIPAVIALTDPEGCPLSRFKDSLGNPTHILRIGESYKEKQRTIQAKKEVEQRRAGGYSRKYASKAKNLADDMVRNTARDLLYYAVTQDAMLIFENLSRGFGRQGKRTFMAERQYTRMEDWLTAKLAYEGLPSKTYLSKTLAQYTSKTCSNCGFTITSADYDRVLEKLKKTATGWMTTINGKELKVEGQITYYNRYKRQNVVKDLSVELDRLSEESVNNDISSWTKGRSGEALSLLKKRFSHRPVQEKFVCLNCGFETHADEQAALNIARSWLFLRSQEYKKYQTNKTTGNTDKRAFVETWQSFYRKKLKEVWKPAV

SEQ ID NO: 49032 - protein, 979 aa, synthetic construct
  REGION 1..979: note = engineered CasX variant
QEIKRINKIRRRLVKDSNTKKAGKTGPMKTLLVRVMTPDLRERLENLRKKPENIPQPISNTSRANLNKLLTDYTEMKKAILHVYWEEFQKDPVGLMSRVAQPASKKIDQNKLKPEMDEKGNLTTAGFACSQCGQPLFVYKLEQVSEKGKAYTNYFGRCNVAEHEKLILLAQLKPEKDSDEAVTYSLGKFGQRALDFYSIHVTKESTHPVKPLAQIAGNRYASGPVGKALRDACMGTIASFLSKYQDIIIEHQKVVKGNQKRLESLRELAGKENLEYPSVTLPPQPHTKEGVDAYNEVIARVRTWVNLNLWQKLKLSRDDAKPLLRLKGFPSFPLVERQANEVDWWDMVCNVKKLINEKKEDGKVFWQNLAGYKRQEALRPYLSSEEDRKKGKKFARYQLGDLLLHLEKKHGEDWGKVYDEAWERIDKKVEGLSKHIKLEEERRSEDAQSKAALTDWLRAKASFVIEGLKEADDKDEFCRCELKLQKWYGDLRGKPFAIEAENSILDISGFSKQYNCAFIWQKDGVKKLNLYLIINYFKGGKLRFKKIKPEAFEANRFYTVINKKSGEIVPMEVNFNFDDPNLIILPLAFGKRQGREFIWNDLLSLETGSLKLANGRVIEKTLYNRRTRQDEPALFVALTFERREVLDSSNIKPMNLIGVDRGENIPAVIALTDPEGCPLSRFKDSLGNPTHILRIGESYKEKQRTIQAKKEVEQRRAGGYSRKYASKAKNLADDMVRNTARDLLYYAVTQDAMLIFENLSRGFGRQGKRTFMAERQYTRMEDWLTAKLAYEGLPSKTYLSKTLAQYTSKTCSNCGFTITSADYDRVLEKLKKTATGWMTTINGKELKVEGQITYYNRYKRQNVVKDLSVELDRLSEESVNNDISSWTKGRSGEALSLLKKRFSHRPVQEKFVCLNCGFETHADEQAALNIARSWLFLRSQEYKKYQTNKTTGNTDKRAFVETWQSFYRKKLKEVWKPAV

SEQ ID NO: 49033 - protein, 979 aa, synthetic construct
  REGION 1..979: note = engineered CasX variant
QEIKRINKIRRRLVKDSNTKKAGKTGPMKTLLVRVMTPDLRERLENLRKKPENIPQPISNTSRANLNKLLTDYTEMKKAILHVYWEEFQKDPVGLMSRVAQPASKKIDQNKLKPEMDEKGNLTTAGFACSQCGQPLFVYKLEQVSEKGKAYTNYFGRCNVAEHEKLILLAQLKPEKDSDEAVTYSLGKFGQRALDFYSIHVTKESTHPVKPLAQIAGNRYASGPVGKALRDACMGTIASFLSKYQDIIIEHQKVVKGNQKRLESLRELAGKENLEYPSVTLPPQPHTKEGVDAYNEVIARVRTWVNLNLWQKLKLSRDDAKPLLRLKGFPSFPLVERQANEVDWWDMVCNVKKLINEKKEDGKVFWQNLAGYKRQEALRPYLSSEEDRKKGKKFARYQLGDLLLHLEKKHGEDWGKVYDEAWERIDKKVEGLSKHIKLEEERRSEDAQSKAALTDWLRAKASFVIEGLKEADKDEFCRCELKLQKWYGDLRGKPFAIEAENSILDISGFSKQYNCAFIWQKDGVKKLNLYLIINYFKGGKLRFKKIKPEAFEANRFYTVINKKSGEIVPMEVNFNFDDPNLIILPLAFGKRQGREFIWNDLLSLETGSLKLANGRVIEKTLYNRRTRQDEPALFVALTFERREVLDSSNIKPMNLIGVDRGENIPAVIALTDPEGCPLSRFKDSLGNPTHILRIGESYKEKQRTIQAKKEVEQRRAGGYSRKYASKAKNLADDMVRNTARDLLYYAVTQDAMLIFENLSRGFGRQGKRTFMAERQYTRMEDWLTAKLAYEGLPSKTYLSKTLAQYTSKTCSNCGFTITSADYDRVLEKLKKTATGWMTTINGKELKVEGQITYYNRYKRQNVVKDLSVELDRLSEESVNNDISSWTKGRSGNEALSLLKKRFSHRPVQEKFVCLNCGFETHADEQAALNIARSWLFLRSQEYKKYQTNKTTGNTDKRAFVETWQSFYRKKLKEVWKPAV

SEQ ID NO: 49034 - protein, 978 aa, synthetic construct
  REGION 1..978: note = engineered CasX variant
QEIKRINKIRRRLVKDSNTKKAGKTGPMKTLLVRVMTPDLRERLENLRKKPENIPQPISNTSRANLNKLLTDYTEMKKAILHVYWEEFQKDPVGLMSRVAQPASKKIDQNKLKPEMDEKGNLTTAGFACSQCGQPLFVYKLEQVSEKGKAYTNYFGRCNVAEHEKLILLAQLKPEKDSDEAVTYSLGKFGQRALDFYSIHVTKESTHPVKPLAQIAGNRYASGPVGKALRDACMGTIASFLSKYQDIIIEHQKVVKGNQKRLESLRELAGKENLEYPSVTLPPQPHTKEGVDAYNEVIARVRTWVNLNLWQKLKLSRDDAKPLLRLKGFPSFPLVERQANEVDWWDMVCNVKKLINEKKEDGKVFWQNLAGYKRQEALRPYLSSEEDRQKGKKFARYQLGDLLLHLEKKHGEDWGKVYDEAWERIDKKVEGLSKHIKLEEERRSEDAQSKAALTDWLRAKASFVIEGLKEADKDEFCRCELKLQKWYGDLRGKPFAIEAENSILDISGFSKQYNCAFIWQKDGVKKLNLYLIINYFKGGKLRFKKIKPEAFEANRFYTVINKKSGEIVPMEVNFNFDDPNLIILPLAFGKRQGREFIWNDLLSLETGSLKLANGRVIEKTLYNRRTRQDEPALFVALTFERREVLDSSNIKPMNLIGVDRGENIPAVIALTDPEGCPLSRFKDSLGNPTHILRIGESYKEKQRTIQAKKEVEQRRAGGYSRKYASKAKNLADDMVRNTARDLLYYAVTQDAMLIFENLSRGFGRQGKRTFMAERQYTRMEDWLTAKLAYEGLPSKTYLSKTLAQYTSKTCSNCGFTITSADYDRVLEKLKKTATGWMTTINGKELKVEGQITYYNRYKRQNVVKDLSVELDRLSEESVNNDISSWTKGRSGEALSLLKKRFSHRPVQEKFVCLNCGFETHADEQAALNIARSWLFLRSQEYKKYQTNKTTGNTDKRAFVETWQSFYRKKLKEVWKPAV

SEQ ID NO: 49035 - protein, 978 aa, synthetic construct
  REGION 1..978: note = engineered CasX variant
QEIKRINKIRRRLVKDSNTKKAGKTGPMKTLLVRVMTPDLRERLENLRKKPENIPQPISNTSRANLNKLLTDYTEMKKAILHVYWEEFQKDPVGLMSRVAQPASKKIDQNKLKPEMDEKGNLTTAGFACSQCGQPLFVYKLEQVSEKGKAYTNYFGRCNVAEHEKLILLAQLKPEKDSDEAVTYSLGKFGQRALDFYSIHVTKESTHPVKPLAQIAGNRYASGPVGKALRDACMGTIASFLSKYQDIIIEHQKVVKGNQKRLESLRELAGKENLEYPSVTLPPQPHTKEGVDAYNEVIARVRTWVNLNLWQKLKLSRDDAKPLLRLKGFPSFPLVERQANEVDWWDMVCNVKKLINEKKEDGKVFWQNLAGYKRQEALRPYLSSEEDRKKGKKFARYQLGDLLLHLEKKHGEDWGKVYDEAWERIDKKVEGLSKHIKLEEERRSEDAQSKAALTDWLRAKASFVIEGLKEADKDEFCRCELKLQKWYGDLRGKPFAIEAENSILDISGFSKQYNCAFIWQKDGVKKLNLYLIINYFKGGKLRFKKIKPEAFEANRFYTVINKKSGEIVPMEVNFNFDDPNLIILPLAFGKRQGREFIWNDLLSLETGSLKLANGRVIEKTLYNRRTRQDEPALFVALTFERREVLDSSNIKPMNLIGVDRGENIPAVIALTDPEGCPLSRFKDSLGNPTHILRIGESYKEKQRTIQAKKEVEQRRAGGYSRKYASKAKNLADDMVRNTARDLLYYAVTQDAMLIFENLSRGFGRQGKRTFMAERQYTRMEDWLTAKLAYEGLPSQTYLSKTLAQYTSKTCSNCGFTITSADYDRVLEKLKKTATGWMTTINGKELKVEGQITYYNRYKRQNVVKDLSVELDRLSEESVNNDISSWTKGRSGEALSLLKKRFSHRPVQEKFVCLNCGFETHADEQAALNIARSWLFLRSQEYKKYQTNKTTGNTDKRAFVETWQSFYRKKLKEVWKPAV

SEQ ID NO: 49036 - protein, 978 aa, synthetic construct
  REGION 1..978: note = engineered CasX variant
QEIKRINKIRRRLVKDSNTKKAGKTGPMKTLLVRVMTPDLRERLENLRKKPENIPQPISNTSRANLNKLLTDYTEMKKAILHVYWEEFQKDPVGLMSRVAQPASKKIDQNKLKPEMDEKGNLTTAGFACSQCGQPLFVYKLEQVSEKGKAYTNYFGRCNVAEHEKLILLAQLKPEKDSDEAVTYSLGKFGQRALDFYSIHVTKESTHPVKPLAQIAGNRYASGPVGKALRDACMGTIASFLSKYQDIIIEHQKVVKGNQKRLESLRELAGKENLEYPSVTLPPQPHTKEGVDAYNEVIARVRTWVNLNLWQKLKLSRDDAKPLLRLKGFPSFPLVERQANEVDWWDMVCNVKKLINEKKEDGKVFWQNLAGYKRQEALRPYLSSEEDRKKGKKFARYQLGDLLLHLEKKHGEDWGKVYDEAWERIDKKVEGLSKHIKLEEERRSEDAQSKAALTDWLRAKASFVIEGLKEADKDEFCRCELKLQKWYGDLRGKPFAIEAENSILDISGFSKQYNCAFIWQKDGVKKLNLYLIINYFKGGKLRFKKIKPEAFEANRFYTVINKKSGEIVPMEVNFNFDDPNLIILPLAFGKRQGREFIWNDLLSLETGSLKLANGRVIEKTLYNRRTRQDEPALFVALTFERREVLDSSNIKPMNLIGVDRGENIPAVIALTDPEGCPLSRFKDSLGNPTHILRIGESYKEKQRTIQAKKEVEQRRAGGYSRKYASKAKNLADDMVRNTARDLLYYAVTQDAMLIFENLSRGFGRQGKRTFMAERQYTRMEDWLTAKLAYNGLPSKTYLSKTLAQYTSKTCSNCGFTITSADYDRVLEKLKKTATGWMTTINGKELKVEGQITYYNRYKRQNVVKDLSVELDRLSEESVNNDISSWTKGRSGEALSLLKKRFSHRPVQEKFVCLNCGFETHADEQAALNIARSWLFLRSQEYKKYQTNKTTGNTDKRAFVETWQSFYRKKLKEVWKPAV

SEQ ID NO: 49037 - protein, 978 aa, synthetic construct
  REGION 1..978: note = engineered CasX variant
QEIKRINKIRRRLVKDSNTKKAGKTGPMKTLLVRVMTPDLRERLENLRKKPENIPQPISNTSRANLNKLLTDYTEMKKAILHVYWEEFQKDPVGLMSRVAQPASKKIDQNKLKPEMDEKGNLTTAGFACSQCGQPLFVYKLEQVSEKGKAYTNYFGRCNVAEHEKLIQLAQLKPEKDSDEAVTYSLGKFGQRALDFYSIHVTKESTHPVKPLAQIAGNRYASGPVGKALRDACMGTIASFLSKYQDIIIEHQKVVKGNQKRLESLRELAGKENLEYPSVTLPPQPHTKEGVDAYNEVIARVRTWVNLNLWQKLKLSRDDAKPLLRLKGFPSFPLVERQANEVDWWDMVCNVKKLINEKKEDGKVFWQNLAGYKRQEALRPYLSSEEDRKKGKKFARYQLGDLLLHLEKKHGEDWGKVYDEAWERIDKKVEGLSKHIKLEEERRSEDAQSKAALTDWLRAKASFVIEGLKEADKDEFCRCELKLQKWYGDLRGKPFAIEAENSILDISGFSKQYNCAFIWQKDGVKKLNLYLIINYFKGGKLRFKKIKPEAFEANRFYTVINKKSGEIVPMEVNFNFDDPNLIILPLAFGKRQGREFIWNDLLSLETGSLKLANGRVIEKTLYNRRTRQDEPALFVALTFERREVLDSSNIKPMNLIGVDRGENIPAVIALTDPEGCPLSRFKDSLGNPTHILRIGESYKEKQRTIQAKKEVEQRRAGGYSRKYASKAKNLADDMVRNTARDLLYYAVTQDAMLIFENLSRGFGRQGKRTFMAERQYTRMEDWLTAKLAYEGLPSKTYLSKTLAQYTSKTCSNCGFTITSADYDRVLEKLKKTATGWMTTINGKELKVEGQITYYNRYKRQNVVKDLSVELDRLSEESVNNDISSWTKGRSGEALSLLKKRFSHRPVQEKFVCLNCGFETHADEQAALNIARSWLFLRSQEYKKYQTNKTTGNTDKRAFVETWQSFYRKKLKEVWKPAV

SEQ ID NO: 49038 - protein, 978 aa, synthetic construct
  REGION 1..978: note = engineered CasX variant
QEIKRINKIRRRLVKDSNTKKAGKTGPMKTLLVRVMTPDLRERLENLRKKPENIPQPISNTSRANLNKLLTDYTEMKKAILHVYWEEFQKDPVGLMSRVAQPASKKIDQNKLKPEMDEKGNLTTAGFACSQCGQPLFVYKLEQVSEKGKAYTNYFGRCNVAEHEKLILLAQLKPEKDSDEAVTYSLGKFGQRALDFYSIHVTKESTHPVKPLAQIAGNRYASGPVGKALRDACMGTIASFLSKYQDIIIEHQKVVKGNQKRLESLRELAGKENLEYPSVTLPPQPHTKEGVDAYNEVIARVRTWVNLNLWQKLKLSRDDAKPLLRLKGFPSFPLVERQANEVDWWDMVCNVKKLINEKKEDGKVFWQNLAIYKRQEALRPYLSSEEDRKKGKKFARYQLGDLLLHLEKKHGEDWGKVYDEAWERIDKKVEGLSKHIKLEEERRSEDAQSKAALTDWLRAKASFVIEGLKEADKDEFCRCELKLQKWYGDLRGKPFAIEAENSILDISGFSKQYNCAFIWQKDGVKKLNLYLIINYFKGGKLRFKKIKPEAFEANRFYTVINKKSGEIVPMEVNFNFDDPNLIILPLAFGKRQGREFIWNDLLSLETGSLKLANGRVIEKTLYNRRTRQDEPALFVALTFERREVLDSSNIKPMNLIGVDRGENIPAVIALTDPEGCPLSRFKDSLGNPTHILRIGESYKEKQRTIQAKKEVEQRRAGGYSRKYASKAKNLADDMVRNTARDLLYYAVTQDAMLIFENLSRGFGRQGKRTFMAERQYTRMEDWLTAKLAYEGLPSKTYLSKTLAQYTSKTCSNCGFTITSADYDRVLEKLKKTATGWMTTINGKELKVEGQITYYNRYKRQNVVKDLSVELDRLSEESVNNDISSWTKGRSGEALSLLKKRFSHRPVQEKFVCLNCGFETHADEQAALNIARSWLFLRSQEYKKYQTNKTTGNTDKRAFVETWQSFYRKKLKEVWKPAV

SEQ ID NO: 49039 - protein, 978 aa, synthetic construct
  REGION 1..978: note = engineered CasX variant
QEIKRINKIRRRLVKDSNTKKAGKTGPMKTLLVRVMTPDLRERLENLRKKPENIPQPISNTSRANLNKLLTDYTEMKKAILHVYWEEFQKDPVGLMSRVAQPASKKIDQNKLKPEMDEKGNLTTAGFACSQCGQPLFVYKLEQVSEKGKAYTNYFGRCNVAEHEKLILLAQLKPEKDSDEAVTYSLGKFGQRALDFYSIHVTKESTHPVKPLAQIAGNRYASGPVGKALRDACMGTIASFLSKYQDIIIEHQKVVKGNQKRLESLRELAGKENLEYPSVTLPPQPHTKEGVDAYNEVIARVRTWVNLNLWQKLKLSRDDAKPLLRLKGFPSFPLVERQANEVDWWDMVCNVKKLINEKKEDGKVFWQNLAGYKRQEALRPYLSSEEDREKGKKFARYQLGDLLLHLEKKHGEDWGKVYDEAWERIDKKVEGLSKHIKLEEERRSEDAQSKAALTDWLRAKASFVIEGLKEADKDEFCRCELKLQKWYGDLRGKPFAIEAENSILDISGFSKQYNCAFIWQKDGVKKLNLYLIINYFKGGKLRFKKIKPEAFEANRFYTVINKKSGEIVPMEVNFNFDDPNLIILPLAFGKRQGREFIWNDLLSLETGSLKLANGRVIEKTLYNRRTRQDEPALFVALTFERREVLDSSNIKPMNLIGVDRGENIPAVIALTDPEGCPLSRFKDSLGNPTHILRIGESYKEKQRTIQAKKEVEQRRAGGYSRKYASKAKNLADDMVRNTARDLLYYAVTQDAMLIFENLSRGFGRQGKRTFMAERQYTRMEDWLTAKLAYEGLPSKTYLSKTLAQYTSKTCSNCGFTITSADYDRVLEKLKKTATGWMTTINGKELKVEGQITYYNRYKRQNVVKDLSVELDRLSEESVNNDISSWTKGRSGEALSLLKKRFSHRPVQEKFVCLNCGFETHADEQAALNIARSWLFLRSQEYKKYQTNKTTGNTDKRAFVETWQSFYRKKLKEVWKPAV

SEQ ID NO: 49040 - protein, 978 aa, synthetic construct
  REGION 1..978: note = engineered CasX variant
QEIKRINKIRRRLVKDSNTKKAGKTGPMKTLLVRVMTPDLRERLENLRKKPENIPQPISNTSRANLNKLLTDYTEMKKAILHVYWEEFQKDPVGLMSRVAQPASKKIDQNKLKPEMDEKGNLTTAGFACSQCGQPLFVYKLEQVSEKGKAYTNYFGRCNVAEHEKLILLAQLKPEKDSDEAVTYSLGKFGQRALDFYSIHVTKESTHPVKPLAQIAGNRYASGPVGKALRDACMGTIASFLSKYQDIIIEHQKVVKGNQKRLESLRELAGKENLEYPSVTLPPQPHTKEGVDAYNEVIARVRTWVNLNLWQKLKLSRDDAKPLLRLKGFPSFPLVERQANEVDWWDMVCNVKKLINEKKEDGKVFWQNLAGYKRQEALRPYLSSEEDRKKGKKFARYQLGDLLLHLEKKHGEDWGKVYDEAWERIDKKVEGLSKHIKLEEERRSEDAQSKAALTDWLRAKASFVIEGLKEADKDEFCRCELKLQKWYGDLRGKPFAIEAENSILDISGFSKQYNCAFIWQKDGVKKLNLYLIINYFKGGKLRFKKIKPEAFEANRFYTVINKKSGEIVIMEVNFNFDDPNLIILPLAFGKRQGREFIWNDLLSLETGSLKLANGRVIEKTLYNRRTRQDEPALFVALTFERREVLDSSNIKPMNLIGVDRGENIPAVIALTDPEGCPLSRFKDSLGNPTHILRIGESYKEKQRTIQAKKEVEQRRAGGYSRKYASKAKNLADDMVRNTARDLLYYAVTQDAMLIFENLSRGFGRQGKRTFMAERQYTRMEDWLTAKLAYEGLPSKTYLSKTLAQYTSKTCSNCGFTITSADYDRVLEKLKKTATGWMTTINGKELKVEGQITYYNRYKRQNVVKDLSVELDRLSEESVNNDISSWTKGRSGEALSLLKKRFSHRPVQEKFVCLNCGFETHADEQAALNIARSWLFLRSQEYKKYQTNKTTGNTDKRAFVETWQSFYRKKLKEVWKPAV

SEQ ID NO: 49041 - protein, 978 aa, synthetic construct
  REGION 1..978: note = engineered CasX variant
QEIKRINKIRRRLVKDSNTKKAGKTGPMKTLLVRVMTPDLRERLENLRKKPENIPQPISNTSRANLNKLLTDYTEMKKAILHVYWEEFQKDPVGLMSRVAQPASKKIDQNKLKPEMDEKGNLTTAGFACSQCGQPLFVYKLEQVSEKGKAYTNYFGRCNVAEHEKLILLAQLKPEKDSDEAVTYSLGKFGQRALDFYSIHVTKESTHPVKPLAQIAGNRYASGPVGKALRGACMGTIASFLSKYQDIIIEHQKVVKGNQKRLESLRELAGKENLEYPSVTLPPQPHTKEGVDAYNEVIARVRWWVNLNLWQKLKLSRDDAKPLLRLKGFPSFPLVERQANEVDWWDMVCNVKKLINEKKEDGKVFWQNLAGYKRQEALRPYLSSEEDRKKGKKFARYQLGDLLLHLEKKHGEDWGKVYDEAWERIDKKVEGLSKHIKLEEERRSEDAQSKAALTDWLRAKASFVIEGLKEADKDEFCRCELKLQKWYGDLRGKPFAIEAENSILDISGFSKQYNCAFIWQKDGVKKLNLYLIINYFKGGKLRFKKIKPEAFEANRFYTVINKKSGEIVPMEVNFNFDDPNLIILPLAFGKRQGREFIWNDLLSLETGSLKLANGRVIEKTLYNRRTRQDEPALFVALTFERREVLDSSNIKPMNLIGVDRGENIPAVIALTDPEGCPLSRFKDSLGNPTHILRIGESYKEKQRTIQAKKEVEQRRAGGYSRKYASKAKNLADDMVRNTARDLLYYAVTQDAMLIFENLSRGFGRQGKRTFMAERQYTRMEDWLTAKLAYEGLPSKTYLSKTLAQYTSKTCSNCGFTITSADYDRVLEKLKKTATGWMTTINGKELKVEGQITYYNRYKRQNVVKDLSVELDRLSEESVNNDISSWTKGRSGEALSLLKKRFSHRPVQEKFVCLNCGFETHADEQAALNIARSWLFLRSQEYKKYQTNKTTGNTDKRAFVETWQSFYRKKLKEVWKPAV

SEQ ID NO: 49042 - protein, 978 aa, synthetic construct
  REGION 1..978: note = engineered CasX variant
QEIKRINKIRRRLVKDSNTKKAGKTGPMKTLLVRVMTPDLRERLENLRKKPENIPQPISNTSRANLNKLLTDYTEMKKAILHVYWEEFQKDPVGLMSRVAQPASKKIDQNKLKPEMDEKGNLTTAGFACSQCGQPLFVYKLEQVSEKGKAYTNYFGRCNVAEHEKLILLAQLKPEKDSDEAVTYSLGKFGQRALDFYSIHVTKESTHPVKPLAQIAGNRYASGPVGKALRDACMGTIASFLSKYQDIIIEHQKVVKGNQKRLESLRELAGKENLEYPSVTLPPQPHTKEGVDAYNEVIARVRWWVNLNLWQKLKLSRDDAKPLLRLKNFPSFPLVERQANEVDWWDMVCNVKKLINEKKEDGKVFWQNLAGYKRQEALRPYLSSEEDRKKGKKFARYQLGDLLLHLEKKHGEDWGKVYDEAWERIDKKVEGLSKHIKLEEERRSEDAQSKAALTDWLRAKASFVIEGLKEADKDEFCRCELKLQKWYGDLRGKPFAIEAENSILDISGFSKQYNCAFIWQKDGVKKLNLYLIINYFKGGKLRFKKIKPEAFEANRFYTVINKKSGEIVPMEVNFNFDDPNLIILPLAFGKRQGREFIWNDLLSLETGSLKLANGRVIEKTLYNRRTRQDEPALFVALTFERREVLDSSNIKPMNLIGVDRGENIPAVIALTDPEGCPLSRFKDSLGNPTHILRIGESYKEKQRTIQAKKEVEQRRAGGYSRKYASKAKNLADDMVRNTARDLLYYAVTQDAMLIFENLSRGFGRQGKRTFMAERQYTRMEDWLTAKLAYEGLPSKTYLSKTLAQYTSKTCSNCGFTITSADYDRVLEKLKKTATGWMTTINGKELKVEGQITYYNRYKRQNVVKDLSVELDRLSEESVNNDISSWTKGRSGEALSLLKKRFSHRPVQEKFVCLNCGFETHADEQAALNIARSWLFLRSQEYKKYQTNKTTGNTDKRAFVETWQSFYRKKLKEVWKPAV

SEQ ID NO: 49043 - protein, 978 aa, synthetic construct
  REGION 1..978: note = engineered CasX variant
QEIKRINKIRRRLVKDSNTKKAGKTGPMKTLLVRVMTPDLRERLENLRKKPENIPQPISNTSRANLNKLLTDYTEMKKAILHVYWEEFQKDPVGLMSRVAQPASKKIDQNKLKPEMDEKGNLTTAGFACSQCGQPLFVYKLEQVSEKGKAYTNYFGRCNVAEHEKLILLAQLKPEKDSDEAVTYSLGKFGQRALDFYSIHVTKESTHPVKPLAQIAGNRYASGPVGKALRDACMGTIASFLSKYQDIIIEHQKVVKGNQKRLESLRELAGKENLEYPSVTLPPQPHTKEGVDAYNEVIARVRWWVNLNLWQKLKLSRDDAKPLLRLKGFPSFPLVERQANEVDWWDMVCNVKKLINEKKEDGKVFWQNLAGYKRQEALRPYLSSEEDRKKGKKFARYQLGDLLNHLEKKHGEDWGKVYDEAWERIDKKVEGLSKHIKLEEERRSEDAQSKAALTDWLRAKASFVIEGLKEADKDEFCRCELKLQKWYGDLRGKPFAIEAENSILDISGFSKQYNCAFIWQKDGVKKLNLYLIINYFKGGKLRFKKIKPEAFEANRFYTVINKKSGEIVPMEVNFNFDDPNLIILPLAFGKRQGREFIWNDLLSLETGSLKLANGRVIEKTLYNRRTRQDEPALFVALTFERREVLDSSNIKPMNLIGVDRGENIPAVIALTDPEGCPLSRFKDSLGNPTHILRIGESYKEKQRTIQAKKEVEQRRAGGYSRKYASKAKNLADDMVRNTARDLLYYAVTQDAMLIFENLSRGFGRQGKRTFMAERQYTRMEDWLTAKLAYEGLPSKTYLSKTLAQYTSKTCSNCGFTITSADYDRVLEKLKKTATGWMTTINGKELKVEGQITYYNRYKRQNVVKDLSVELDRLSEESVNNDISSWTKGRSGEALSLLKKRFSHRPVQEKFVCLNCGFETHADEQAALNIARSWLFLRSQEYKKYQTNKTTGNTDKRAFVETWQSFYRKKLKEVWKPAV

SEQ ID NO: 49044 - protein, 978 aa, synthetic construct
  REGION 1..978: note = engineered CasX variant
QEIKRINKIRRRLVKDSNTKKAGKTGPMKTLLVRVMTPDLRERLENLRKKPENIPQPISNTSRANLNKLLTDYTEMKKAILHVYWEEFQKDPVGLMSRVAQPASKKIDQNKLKPEMDEKGNLTTAGFACSQCGQPLFVYKLEQVSEKGKAYTNYFGRCNVAEHEKLILLAQLKPEKDSDEAVTYSLGKFGQRALDFYSIHVTKESTHPVKPLAQIAGNRYASGPVGKALRDACMGTIASFLSKYQDIIIEHQKVVKGNQKRLESLRELAGKENLEYPSVTLPPQPHTKEGVDAYNEVIARVRWWVNLNLWQKLKLSRDDAKPLLRLKGFPSFPLVERQANEVDWWDMVCNVKKLINEKKEDGKVFWQNLAGYKRQEALRPYLSSEEDRKKGKKFARYQLGDLLWHLEKKHGEDWGKVYDEAWERIDKKVEGLSKHIKLEEERRSEDAQSKAALTDWLRAKASFVIEGLKEADKDEFCRCELKLQKWYGDLRGKPFAIEAENSILDISGFSKQYNCAFIWQKDGVKKLNLYLIINYFKGGKLRFKKIKPEAFEANRFYTVINKKSGEIVPMEVNFNFDDPNLIILPLAFGKRQGREFIWNDLLSLETGSLKLANGRVIEKTLYNRRTRQDEPALFVALTFERREVLDSSNIKPMNLIGVDRGENIPAVIALTDPEGCPLSRFKDSLGNPTHILRIGESYKEKQRTIQAKKEVEQRRAGGYSRKYASKAKNLADDMVRNTARDLLYYAVTQDAMLIFENLSRGFGRQGKRTFMAERQYTRMEDWLTAKLAYEGLPSKTYLSKTLAQYTSKTCSNCGFTITSADYDRVLEKLKKTATGWMTTINGKELKVEGQITYYNRYKRQNVVKDLSVELDRLSEESVNNDISSWTKGRSGEALSLLKKRFSHRPVQEKFVCLNCGFETHADEQAALNIARSWLFLRSQEYKKYQTNKTTGNTDKRAFVETWQSFYRKKLKEVWKPAV

SEQ ID NO: 49045 - protein, 978 aa, synthetic construct
  REGION 1..978: note = engineered CasX variant
QEIKRINKIRRRLVKDSNTKKAGKTGPMKTLLVRVMTPDLRERLENLRKKPENIPQPISNTSRANLNKLLTDYTEMKKAILHVYWEEFQKDPVGLMSRVAQPASKKIDQNKLKPEMDEKGNLTTAGFACSQCGQPLFVYKLEQVSEKGKAYTNYFGRCNVAEHEKLILLAQLKPEKDSDEAVTYSLGKFGQRALDFYSIHVTKESTHPVKPLAQIAGNRYASGPVGKALRDACMGTIASFLSKYQDIIIEHQKVVKGNQKRLESLRELAGKENLEYPSVTLPPQPHTKEGVDAYNEVIARVRWWVNLNLWQKLKLSRDDAKPLLRLKGFPSFPLVERQANEVDWWDMVCNVKKLINEKKEDGKVFWQNLAGYKRQEALRPYLSSEEDRKKGKKFARYQLGDLLLHLYKKHGEDWGKVYDEAWERIDKKVEGLSKHIKLEEERRSEDAQSKAALTDWLRAKASFVIEGLKEADKDEFCRCELKLQKWYGDLRGKPFAIEAENSILDISGFSKQYNCAFIWQKDGVKKLNLYLIINYFKGGKLRFKKIKPEAFEANRFYTVINKKSGEIVPMEVNFNFDDPNLIILPLAFGKRQGREFIWNDLLSLETGSLKLANGRVIEKTLYNRRTRQDEPALFVALTFERREVLDSSNIKPMNLIGVDRGENIPAVIALTDPEGCPLSRFKDSLGNPTHILRIGESYKEKQRTIQAKKEVEQRRAGGYSRKYASKAKNLADDMVRNTARDLLYYAVTQDAMLIFENLSRGFGRQGKRTFMAERQYTRMEDWLTAKLAYEGLPSKTYLSKTLAQYTSKTCSNCGFTITSADYDRVLEKLKKTATGWMTTINGKELKVEGQITYYNRYKRQNVVKDLSVELDRLSEESVNNDISSWTKGRSGEALSLLKKRFSHRPVQEKFVCLNCGFETHADEQAALNIARSWLFLRSQEYKKYQTNKTTGNTDKRAFVETWQSFYRKKLKEVWKPAV

SEQ ID NO: 49046 - protein, 978 aa, synthetic construct
  REGION 1..978: note = engineered CasX variant
QEIKRINKIRRRLVKDSNTKKAGKTGPMKTLLVRVMTPDLRERLENLRKKPENIPQPISNTSRANLNKLLTDYTEMKKAILHVYWEEFQKDPVGLMSRVAQPASKKIDQNKLKPEMDEKGNLTTAGFACSQCGQPLFVYKLEQVSEKGKAYTNYFGRCNVAEHEKLILLAQLKPEKDSDEAVTYSLGKFGQRALDFYSIHVTKESTHPVKPLAQIAGNRYASGPVGKALRDACMGTIASFLSKYQDIIIEHQKVVKGNQKRLESLRELAGKENLEYPSVTLPPQPHTKEGVDAYNEVIARVRWWVNLNLWQKLKLSRDDAKPLLRLKGFPSFPLVERQANEVDWWDMVCNVKKLINEKKEDGKVFWQNLAGYKRQEALRPYLSSEEDRKKGKKFARYQLGDLLLHLEKKHPEDWGKVYDEAWERIDKKVEGLSKHIKLEEERRSEDAQSKAALTDWLRAKASFVIEGLKEADKDEFCRCELKLQKWYGDLRGKPFAIEAENSILDISGFSKQYNCAFIWQKDGVKKLNLYLIINYFKGGKLRFKKIKPEAFEANRFYTVINKKSGEIVPMEVNFNFDDPNLIILPLAFGKRQGREFIWNDLLSLETGSLKLANGRVIEKTLYNRRTRQDEPALFVALTFERREVLDSSNIKPMNLIGVDRGENIPAVIALTDPEGCPLSRFKDSLGNPTHILRIGESYKEKQRTIQAKKEVEQRRAGGYSRKYASKAKNLADDMVRNTARDLLYYAVTQDAMLIFENLSRGFGRQGKRTFMAERQYTRMEDWLTAKLAYEGLPSKTYLSKTLAQYTSKTCSNCGFTITSADYDRVLEKLKKTATGWMTTINGKELKVEGQITYYNRYKRQNVVKDLSVELDRLSEESVNNDISSWTKGRSGEALSLLKKRFSHRPVQEKFVCLNCGFETHADEQAALNIARSWLFLRSQEYKKYQTNKTTGNTDKRAFVETWQSFYRKKLKEVWKPAV

SEQ ID NO: 49047 - protein, 979 aa, synthetic construct
  REGION 1..979: note = engineered CasX variant
QEIKRINKIRRRLVKDSNTKKAGKTGPMKTLLVRVMTPDLRERLENLRKKPENIPQPISNTSRANLNKLLTDYTEMKKAILHVYWEEFQKDPVGLMSRVAQPASKKIDQNKLKPEMDEKGNLTTAGFACSQCGQPLFVYKLEQVSEKGKAYTNYFGRCNVAEHEKLILLAQLKPEKDSDEAVTYSLGKFGQRALDFYSIHVTKESTHPVKPLAQIAGNRYASGPVGKALRDACMGTIASFLSKYQDIIIEHQKVVKGNQKRLESLRELAGKENLEYPSVTLPPQPHTKEGVDAYNEVIARVRWWVNLNLWQKLKLSRDDAKPLLRLKGFPSFPLVERQANEVDWWDMVCNVKKLINEKKEDGKVFWQNLAGYKRQEALRPYLSSEEDRKKGKKFARYQLGDLLLHLEKKHGERDWGKVYDEAWERIDKKVEGLSKHIKLEEERRSEDAQSKAALTDWLRAKASFVIEGLKEADKDEFCRCELKLQKWYGDLRGKPFAIEAENSILDISGFSKQYNCAFIWQKDGVKKLNLYLIINYFKGGKLRFKKIKPEAFEANRFYTVINKKSGEIVPMEVNFNFDDPNLIILPLAFGKRQGREFIWNDLLSLETGSLKLANGRVIEKTLYNRRTRQDEPALFVALTFERREVLDSSNIKPMNLIGVDRGENIPAVIALTDPEGCPLSRFKDSLGNPTHILRIGESYKEKQRTIQAKKEVEQRRAGGYSRKYASKAKNLADDMVRNTARDLLYYAVTQDAMLIFENLSRGFGRQGKRTFMAERQYTRMEDWLTAKLAYEGLPSKTYLSKTLAQYTSKTCSNCGFTITSADYDRVLEKLKKTATGWMTTINGKELKVEGQITYYNRYKRQNVVKDLSVELDRLSEESVNNDISSWTKGRSGEALSLLKKRFSHRPVQEKFVCLNCGFETHADEQAALNIARSWLFLRSQEYKKYQTNKTTGNTDKRAFVETWQSFYRKKLKEVWKPAV

SEQ ID NO: 49048 - protein, 979 aa, synthetic construct
  REGION 1..979: note = engineered CasX variant
QEIKRINKIRRRLVKDSNTKKAGKTGPMKTLLVRVMTPDLRERLENLRKKPENIPQPISNTSRANLNKLLTDYTEMKKAILHVYWEEFQKDPVGLMSRVAQPASKKIDQNKLKPEMDEKGNLTTAGFACSQCGQPLFVYKLEQVSEKGKAYTNYFGRCNVAEHEKLILLAQLKPEKDSDEAVTYSLGKFGQRALDFYSIHVTKESTHPVKPLAQIAGNRYASGPVGKALRDACMGTIASFLSKYQDIIIEHQKVVKGNQKRLESLRELAGKENLEYPSVTLPPQPHTKEGVDAYNEVIARVRWWVNLNLWQKLKLSRDDAKPLLRLKGFPSFPLVERQANEVDWWDMVCNVKKLINEKKEDGKVFWQNLAGYKRQEALRPYLSSEEDRKKGKKFARYQLGDLLLHLEKKHGEYDWGKVYDEAWERIDKKVEGLSKHIKLEEERRSEDAQSKAALTDWLRAKASFVIEGLKEADKDEFCRCELKLQKWYGDLRGKPFAIEAENSILDISGFSKQYNCAFIWQKDGVKKLNLYLIINYFKGGKLRFKKIKPEAFEANRFYTVINKKSGEIVPMEVNFNFDDPNLIILPLAFGKRQGREFIWNDLLSLETGSLKLANGRVIEKTLYNRRTRQDEPALFVALTFERREVLDSSNIKPMNLIGVDRGENIPAVIALTDPEGCPLSRFKDSLGNPTHILRIGESYKEKQRTIQAKKEVEQRRAGGYSRKYASKAKNLADDMVRNTARDLLYYAVTQDAMLIFENLSRGFGRQGKRTFMAERQYTRMEDWLTAKLAYEGLPSKTYLSKTLAQYTSKTCSNCGFTITSADYDRVLEKLKKTATGWMTTINGKELKVEGQITYYNRYKRQNVVKDLSVELDRLSEESVNNDISSWTKGRSGEALSLLKKRFSHRPVQEKFVCLNCGFETHADEQAALNIARSWLFLRSQEYKKYQTNKTTGNTDKRAFVETWQSFYRKKLKEVWKPAV

SEQ ID NO: 49049 - protein, 978 aa, synthetic construct
  REGION 1..978: note = engineered CasX variant
QEIKRINKIRRRLVKDSNTKKAGKTGPMKTLLVRVMTPDLRERLENLRKKPENIPQPISNTSRANLNKLLTDYTEMKKAILHVYWEEFQKDPVGLMSRVAQPASKKIDQNKLKPEMDEKGNLTTAGFACSQCGQPLFVYKLEQVSEKGKAYTNYFGRCNVAEHEKLILLAQLKPEKDSDEAVTYSLGKFGQRALDFYSIHVTKESTHPVKPLAQIAGNRYASGPVGKALRDACMGTIASFLSKYQDIIIEHQKVVKGNQKRLESLRELAGKENLEYPSVTLPPQPHTKEGVDAYNEVIARVRWWVNLNLWQKLKLSRDDAKPLLRLKGFPSFPLVERQANEVDWWDMVCNVKKLINEKKEDGKVFWQNLAGYKRQEALRPYLSSEEDRKKGKKFARYQLGDLLLHLEKKHGEDWGDVYDEAWERIDKKVEGLSKHIKLEEERRSEDAQSKAALTDWLRAKASFVIEGLKEADKDEFCRCELKLQKWYGDLRGKPFAIEAENSILDISGFSKQYNCAFIWQKDGVKKLNLYLIINYFKGGKLRFKKIKPEAFEANRFYTVINKKSGEIVPMEVNFNFDDPNLIILPLAFGKRQGREFIWNDLLSLETGSLKLANGRVIEKTLYNRRTRQDEPALFVALTFERREVLDSSNIKPMNLIGVDRGENIPAVIALTDPEGCPLSRFKDSLGNPTHILRIGESYKEKQRTIQAKKEVEQRRAGGYSRKYASKAKNLADDMVRNTARDLLYYAVTQDAMLIFENLSRGFGRQGKRTFMAERQYTRMEDWLTAKLAYEGLPSKTYLSKTLAQYTSKTCSNCGFTITSADYDRVLEKLKKTATGWMTTINGKELKVEGQITYYNRYKRQNVVKDLSVELDRLSEESVNNDISSWTKGRSGEALSLLKKRFSHRPVQEKFVCLNCGFETHADEQAALNIARSWLFLRSQEYKKYQTNKTTGNTDKRAFVETWQSFYRKKLKEVWKPAV

SEQ ID NO: 49050 - protein, 978 aa, synthetic construct
  REGION 1..978: note = engineered CasX variant
QEIKRINKIRRRLVKDSNTKKAGKTGPMKTLLVRVMTPDLRERLENLRKKPENIPQPISNTSRANLNKLLTDYTEMKKAILHVYWEEFQKDPVGLMSRVAQPASKKIDQNKLKPEMDEKGNLTTAGFACSQCGQPLFVYKLEQVSEKGKAYTNYFGRCNVAEHEKLILLAQLKPEKDSDEAVTYSLGKFGQRALDFYSIHVTKESTHPVKPLAQIAGNRYASGPVGKALRDACMGTIASFLSKYQDIIIEHQKVVKGNQKRLESLRELAGKENLEYPSVTLPPQPHTKEGVDAYNEVIARVRWWVNLNLWQKLKLSRDDAKPLLRLKGFPSFPLVERQANEVDWWDMVCNVKKLINEKKEDGKVFWQNLAGYKRQEALRPYLSSEEDRKKGKKFARYQLGDLLLHLEKKHGEDWGKVYGEAWERIDKKVEGLSKHIKLEEERRSEDAQSKAALTDWLRAKASFVIEGLKEADKDEFCRCELKLQKWYGDLRGKPFAIEAENSILDISGFSKQYNCAFIWQKDGVKKLNLYLIINYFKGGKLRFKKIKPEAFEANRFYTVINKKSGEIVPMEVNFNFDDPNLIILPLAFGKRQGREFIWNDLLSLETGSLKLANGRVIEKTLYNRRTRQDEPALFVALTFERREVLDSSNIKPMNLIGVDRGENIPAVIALTDPEGCPLSRFKDSLGNPTHILRIGESYKEKQRTIQAKKEVEQRRAGGYSRKYASKAKNLADDMVRNTARDLLYYAVTQDAMLIFENLSRGFGRQGKRTFMAERQYTRMEDWLTAKLAYEGLPSKTYLSKTLAQYTSKTCSNCGFTITSADYDRVLEKLKKTATGWMTTINGKELKVEGQITYYNRYKRQNVVKDLSVELDRLSEESVNNDISSWTKGRSGEALSLLKKRFSHRPVQEKFVCLNCGFETHADEQAALNIARSWLFLRSQEYKKYQTNKTTGNTDKRAFVETWQSFYRKKLKEVWKPAV

SEQ ID NO: 49051 - protein, 978 aa, synthetic construct
  REGION 1..978: note = engineered CasX variant
QEIKRINKIRRRLVKDSNTKKAGKTGPMKTLLVRVMTPDLRERLENLRKKPENIPQPISNTSRANLNKLLTDYTEMKKAILHVYWEEFQKDPVGLMSRVAQPASKKIDQNKLKPEMDEKGNLTTAGFACSQCGQPLFVYKLEQVSEKGKAYTNYFGRCNVAEHEKLILLAQLKPEKDSDEAVTYSLGKFGQRALDFYSIHVTKESTHPVKPLAQIAGNRYASGPVGKALRDACMGTIASFLSKYQDIIIEHQKVVKGNQKRLESLRELAGKENLEYPSVTLPPQPHTKEGVDAYNEVIARVRWWVNLNLWQKLKLSRDDAKPLLRLKGFPSFPLVERQANEVDWWDMVCNVKKLINEKKEDGKVFWQNLAGYKRQEALRPYLSSEEDRKKGKKFARYQLGDLLLHLEKKHGEDWGKVYDEAWERIDKKVEGLSKHIKLEEERRSEDAQSKAALTDWLRAKASFVIEGKKEADKDEFCRCELKLQKWYGDLRGKPFAIEAENSILDISGFSKQYNCAFIWQKDGVKKLNLYLIINYFKGGKLRFKKIKPEAFEANRFYTVINKKSGEIVPMEVNFNFDDPNLIILPLAFGKRQGREFIWNDLLSLETGSLKLANGRVIEKTLYNRRTRQDEPALFVALTFERREVLDSSNIKPMNLIGVDRGENIPAVIALTDPEGCPLSRFKDSLGNPTHILRIGESYKEKQRTIQAKKEVEQRRAGGYSRKYASKAKNLADDMVRNTARDLLYYAVTQDAMLIFENLSRGFGRQGKRTFMAERQYTRMEDWLTAKLAYEGLPSKTYLSKTLAQYTSKTCSNCGFTITSADYDRVLEKLKKTATGWMTTINGKELKVEGQITYYNRYKRQNVVKDLSVELDRLSEESVNNDISSWTKGRSGEALSLLKKRFSHRPVQEKFVCLNCGFETHADEQAALNIARSWLFLRSQEYKKYQTNKTTGNTDKRAFVETWQSFYRKKLKEVWKPAV

SEQ ID NO: 49052 - protein, 978 aa, synthetic construct
  REGION 1..978: note = engineered CasX variant
QEIKRINKIRRRLVKDSNTKKAGKTGPMKTLLVRVMTPDLRERLENLRKKPENIPQPISNTSRANLNKLLTDYTEMKKAILHVYWEEFQKDPVGLMSRVAQPASKKIDQNKLKPEMDEKGNLTTAGFACSQCGQPLFVYKLEQVSEKGKAYTNYFGRCNVAEHEKLILLAQLKPEKDSDEAVTYSLGKFGQRALDFYSIHVTKESTHPVKPLAQIAGNRYASGPVGKALRDACMGTIASFLSKYQDIIIEHQKVVKGNQKRLESLRELAGKENLEYPSVTLPPQPHTKEGVDAYNEVIARVRWWVNLNLWQKLKLSRDDAKPLLRLKGFPSFPLVERQANEVDWWDMVCNVKKLINEKKEDGKVFWQNLAGYKRQEALRPYLSSEEDRKKGKKFARYQLGDLLLHLEKKHGEDWGKVYDEAWERIDKKVEGLSKHIKLEEERRSEDAQSKAALTDWLRAKASFVIEGSKEADKDEFCRCELKLQKWYGDLRGKPFAIEAENSILDISGFSKQYNCAFIWQKDGVKKLNLYLIINYFKGGKLRFKKIKPEAFEANRFYTVINKKSGEIVPMEVNFNFDDPNLIILPLAFGKRQGREFIWNDLLSLETGSLKLANGRVIEKTLYNRRTRQDEPALFVALTFERREVLDSSNIKPMNLIGVDRGENIPAVIALTDPEGCPLSRFKDSLGNPTHILRIGESYKEKQRTIQAKKEVEQRRAGGYSRKYASKAKNLADDMVRNTARDLLYYAVTQDAMLIFENLSRGFGRQGKRTFMAERQYTRMEDWLTAKLAYEGLPSKTYLSKTLAQYTSKTCSNCGFTITSADYDRVLEKLKKTATGWMTTINGKELKVEGQITYYNRYKRQNVVKDLSVELDRLSEESVNNDISSWTKGRSGEALSLLKKRFSHRPVQEKFVCLNCGFETHADEQAALNIARSWLFLRSQEYKKYQTNKTTGNTDKRAFVETWQSFYRKKLKEVWKPAV

SEQ ID NO: 49053 - protein, 979 aa, synthetic construct
  REGION 1..979: note = engineered CasX variant
QEIKRINKIRRRLVKDSNTKKAGKTGPMKTLLVRVMTPDLRERLENLRKKPENIPQPISNTSRANLNKLLTDYTEMKKAILHVYWEEFQKDPVGLMSRVAQPASKKIDQNKLKPEMDEKGNLTTAGFACSQCGQPLFVYKLEQVSEKGKAYTNYFGRCNVAEHEKLILLAQLKPEKDSDEAVTYSLGKFGQRALDFYSIHVTKESTHPVKPLAQIAGNRYASGPVGKALRDACMGTIASFLSKYQDIIIEHQKVVKGNQKRLESLRELAGKENLEYPSVTLPPQPHTKEGVDAYNEVIARVRWWVNLNLWQKLKLSRDDAKPLLRLKGFPSFPLVERQANEVDWWDMVCNVKKLINEKKEDGKVFWQNLAGYKRQEALRPYLSSEEDRKKGKKFARYQLGDLLLHLEKKHGEDWGKVYDEAWERIDKKVEGLSKHIKLEEERRSEDAQSKAALTDWLRAKASFVIEGLKEADDKDEFCRCELKLQKWYGDLRGKPFAIEAENSILDISGFSKQYNCAFIWQKDGVKKLNLYLIINYFKGGKLRFKKIKPEAFEANRFYTVINKKSGEIVPMEVNFNFDDPNLIILPLAFGKRQGREFIWNDLLSLETGSLKLANGRVIEKTLYNRRTRQDEPALFVALTFERREVLDSSNIKPMNLIGVDRGENIPAVIALTDPEGCPLSRFKDSLGNPTHILRIGESYKEKQRTIQAKKEVEQRRAGGYSRKYASKAKNLADDMVRNTARDLLYYAVTQDAMLIFENLSRGFGRQGKRTFMAERQYTRMEDWLTAKLAYEGLPSKTYLSKTLAQYTSKTCSNCGFTITSADYDRVLEKLKKTATGWMTTINGKELKVEGQITYYNRYKRQNVVKDLSVELDRLSEESVNNDISSWTKGRSGEALSLLKKRFSHRPVQEKFVCLNCGFETHADEQAALNIARSWLFLRSQEYKKYQTNKTTGNTDKRAFVETWQSFYRKKLKEVWKPAV

SEQ ID NO: 49054 - protein, 979 aa, synthetic construct
  REGION 1..979: note = engineered CasX variant
QEIKRINKIRRRLVKDSNTKKAGKTGPMKTLLVRVMTPDLRERLENLRKKPENIPQPISNTSRANLNKLLTDYTEMKKAILHVYWEEFQKDPVGLMSRVAQPASKKIDQNKLKPEMDEKGNLTTAGFACSQCGQPLFVYKLEQVSEKGKAYTNYFGRCNVAEHEKLILLAQLKPEKDSDEAVTYSLGKFGQRALDFYSIHVTKESTHPVKPLAQIAGNRYASGPVGKALRDACMGTIASFLSKYQDIIIEHQKVVKGNQKRLESLRELAGKENLEYPSVTLPPQPHTKEGVDAYNEVIARVRWWVNLNLWQKLKLSRDDAKPLLRLKGFPSFPLVERQANEVDWWDMVCNVKKLINEKKEDGKVFWQNLAGYKRQEALRPYLSSEEDRKKGKKFARYQLGDLLLHLEKKHGEDWGKVYDEAWERIDKKVEGLSKHIKLEEERRSEDAQSKAALTDWLRAKASFVIEGLKEADKDEFCRCELKLQKWYGDLRGKPFAIEAENSILDISGFSKQYNCAFIWQKDGVKKLNLYLIINYFKGGKLRFKKIKPEAFEANRFYTVINKKSGEIVPMEVNFNFDDPNLIILPLAFGKRQGREFIWNDLLSLETGSLKLANGRVIEKTLYNRRTRQDEPALFVALTFERREVLDSSNIKPMNLIGVDRGENIPAVIALTDPEGCPLSRFKDSLGNPTHILRIGESYKEKQRTIQAKKEVEQRRAGGYSRKYASKAKNLADDMVRNTARDLLYYAVTQDAMLIFENLSRGFGRQGKRTFMAERQYTRMEDWLTAKLAYEGLPSKTYLSKTLAQYTSKTCSNCGFTITSADYDRVLEKLKKTATGWMTTINGKELKVEGQITYYNRYKRQNVVKDLSVELDRLSEESVNNDISSWTKGRSGNEALSLLKKRFSHRPVQEKFVCLNCGFETHADEQAALNIARSWLFLRSQEYKKYQTNKTTGNTDKRAFVETWQSFYRKKLKEVWKPAV

SEQ ID NO: 49055 - protein, 978 aa, synthetic construct
  REGION 1..978: note = engineered CasX variant
QEIKRINKIRRRLVKDSNTKKAGKTGPMKTLLVRVMTPDLRERLENLRKKPENIPQPISNTSRANLNKLLTDYTEMKKAILHVYWEEFQKDPVGLMSRVAQPASKKIDQNKLKPEMDEKGNLTTAGFACSQCGQPLFVYKLEQVSEKGKAYTNYFGRCNVAEHEKLILLAQLKPEKDSDEAVTYSLGKFGQRALDFYSIHVTKESTHPVKPLAQIAGNRYASGPVGKALRDACMGTIASFLSKYQDIIIEHQKVVKGNQKRLESLRELAGKENLEYPSVTLPPQPHTKEGVDAYNEVIARVRWWVNLNLWQKLKLSRDDAKPLLRLKGFPSFPLVERQANEVDWWDMVCNVKKLINEKKEDGKVFWQNLAGYKRQEALRPYLSSEEDRQKGKKFARYQLGDLLLHLEKKHGEDWGKVYDEAWERIDKKVEGLSKHIKLEEERRSEDAQSKAALTDWLRAKASFVIEGLKEADKDEFCRCELKLQKWYGDLRGKPFAIEAENSILDISGFSKQYNCAFIWQKDGVKKLNLYLIINYFKGGKLRFKKIKPEAFEANRFYTVINKKSGEIVPMEVNFNFDDPNLIILPLAFGKRQGREFIWNDLLSLETGSLKLANGRVIEKTLYNRRTRQDEPALFVALTFERREVLDSSNIKPMNLIGVDRGENIPAVIALTDPEGCPLSRFKDSLGNPTHILRIGESYKEKQRTIQAKKEVEQRRAGGYSRKYASKAKNLADDMVRNTARDLLYYAVTQDAMLIFENLSRGFGRQGKRTFMAERQYTRMEDWLTAKLAYEGLPSKTYLSKTLAQYTSKTCSNCGFTITSADYDRVLEKLKKTATGWMTTINGKELKVEGQITYYNRYKRQNVVKDLSVELDRLSEESVNNDISSWTKGRSGEALSLLKKRFSHRPVQEKFVCLNCGFETHADEQAALNIARSWLFLRSQEYKKYQTNKTTGNTDKRAFVETWQSFYRKKLKEVWKPAV

SEQ ID NO: 49056 - protein, 978 aa, synthetic construct
  REGION 1..978: note = engineered CasX variant
QEIKRINKIRRRLVKDSNTKKAGKTGPMKTLLVRVMTPDLRERLENLRKKPENIPQPISNTSRANLNKLLTDYTEMKKAILHVYWEEFQKDPVGLMSRVAQPASKKIDQNKLKPEMDEKGNLTTAGFACSQCGQPLFVYKLEQVSEKGKAYTNYFGRCNVAEHEKLILLAQLKPEKDSDEAVTYSLGKFGQRALDFYSIHVTKESTHPVKPLAQIAGNRYASGPVGKALRDACMGTIASFLSKYQDIIIEHQKVVKGNQKRLESLRELAGKENLEYPSVTLPPQPHTKEGVDAYNEVIARVRWWVNLNLWQKLKLSRDDAKPLLRLKGFPSFPLVERQANEVDWWDMVCNVKKLINEKKEDGKVFWQNLAGYKRQEALRPYLSSEEDRKKGKKFARYQLGDLLLHLEKKHGEDWGKVYDEAWERIDKKVEGLSKHIKLEEERRSEDAQSKAALTDWLRAKASFVIEGLKEADKDEFCRCELKLQKWYGDLRGKPFAIEAENSILDISGFSKQYNCAFIWQKDGVKKLNLYLIINYFKGGKLRFKKIKPEAFEANRFYTVINKKSGEIVPMEVNFNFDDPNLIILPLAFGKRQGREFIWNDLLSLETGSLKLANGRVIEKTLYNRRTRQDEPALFVALTFERREVLDSSNIKPMNLIGVDRGENIPAVIALTDPEGCPLSRFKDSLGNPTHILRIGESYKEKQRTIQAKKEVEQRRAGGYSRKYASKAKNLADDMVRNTARDLLYYAVTQDAMLIFENLSRGFGRQGKRTFMAERQYTRMEDWLTAKLAYEGLPSQTYLSKTLAQYTSKTCSNCGFTITSADYDRVLEKLKKTATGWMTTINGKELKVEGQITYYNRYKRQNVVKDLSVELDRLSEESVNNDISSWTKGRSGEALSLLKKRFSHRPVQEKFVCLNCGFETHADEQAALNIARSWLFLRSQEYKKYQTNKTTGNTDKRAFVETWQSFYRKKLKEVWKPAV

SEQ ID NO: 49057 - protein, 978 aa, synthetic construct
  REGION 1..978: note = engineered CasX variant
QEIKRINKIRRRLVKDSNTKKAGKTGPMKTLLVRVMTPDLRERLENLRKKPENIPQPISNTSRANLNKLLTDYTEMKKAILHVYWEEFQKDPVGLMSRVAQPASKKIDQNKLKPEMDEKGNLTTAGFACSQCGQPLFVYKLEQVSEKGKAYTNYFGRCNVAEHEKLILLAQLKPEKDSDEAVTYSLGKFGQRALDFYSIHVTKESTHPVKPLAQIAGNRYASGPVGKALRDACMGTIASFLSKYQDIIIEHQKVVKGNQKRLESLRELAGKENLEYPSVTLPPQPHTKEGVDAYNEVIARVRWWVNLNLWQKLKLSRDDAKPLLRLKGFPSFPLVERQANEVDWWDMVCNVKKLINEKKEDGKVFWQNLAGYKRQEALRPYLSSEEDRKKGKKFARYQLGDLLLHLEKKHGEDWGKVYDEAWERIDKKVEGLSKHIKLEEERRSEDAQSKAALTDWLRAKASFVIEGLKEADKDEFCRCELKLQKWYGDLRGKPFAIEAENSILDISGFSKQYNCAFIWQKDGVKKLNLYLIINYFKGGKLRFKKIKPEAFEANRFYTVINKKSGEIVPMEVNFNFDDPNLIILPLAFGKRQGREFIWNDLLSLETGSLKLANGRVIEKTLYNRRTRQDEPALFVALTFERREVLDSSNIKPMNLIGVDRGENIPAVIALTDPEGCPLSRFKDSLGNPTHILRIGESYKEKQRTIQAKKEVEQRRAGGYSRKYASKAKNLADDMVRNTARDLLYYAVTQDAMLIFENLSRGFGRQGKRTFMAERQYTRMEDWLTAKLAYNGLPSKTYLSKTLAQYTSKTCSNCGFTITSADYDRVLEKLKKTATGWMTTINGKELKVEGQITYYNRYKRQNVVKDLSVELDRLSEESVNNDISSWTKGRSGEALSLLKKRFSHRPVQEKFVCLNCGFETHADEQAALNIARSWLFLRSQEYKKYQTNKTTGNTDKRAFVETWQSFYRKKLKEVWKPAV

SEQ ID NO: 49058 - protein, 978 aa, synthetic construct
  REGION 1..978: note = engineered CasX variant
QEIKRINKIRRRLVKDSNTKKAGKTGPMKTLLVRVMTPDLRERLENLRKKPENIPQPISNTSRANLNKLLTDYTEMKKAILHVYWEEFQKDPVGLMSRVAQPASKKIDQNKLKPEMDEKGNLTTAGFACSQCGQPLFVYKLEQVSEKGKAYTNYFGRCNVAEHEKLIQLAQLKPEKDSDEAVTYSLGKFGQRALDFYSIHVTKESTHPVKPLAQIAGNRYASGPVGKALRDACMGTIASFLSKYQDIIIEHQKVVKGNQKRLESLRELAGKENLEYPSVTLPPQPHTKEGVDAYNEVIARVRWWVNLNLWQKLKLSRDDAKPLLRLKGFPSFPLVERQANEVDWWDMVCNVKKLINEKKEDGKVFWQNLAGYKRQEALRPYLSSEEDRKKGKKFARYQLGDLLLHLEKKHGEDWGKVYDEAWERIDKKVEGLSKHIKLEEERRSEDAQSKAALTDWLRAKASFVIEGLKEADKDEFCRCELKLQKWYGDLRGKPFAIEAENSILDISGFSKQYNCAFIWQKDGVKKLNLYLIINYFKGGKLRFKKIKPEAFEANRFYTVINKKSGEIVPMEVNFNFDDPNLIILPLAFGKRQGREFIWNDLLSLETGSLKLANGRVIEKTLYNRRTRQDEPALFVALTFERREVLDSSNIKPMNLIGVDRGENIPAVIALTDPEGCPLSRFKDSLGNPTHILRIGESYKEKQRTIQAKKEVEQRRAGGYSRKYASKAKNLADDMVRNTARDLLYYAVTQDAMLIFENLSRGFGRQGKRTFMAERQYTRMEDWLTAKLAYEGLPSKTYLSKTLAQYTSKTCSNCGFTITSADYDRVLEKLKKTATGWMTTINGKELKVEGQITYYNRYKRQNVVKDLSVELDRLSEESVNNDISSWTKGRSGEALSLLKKRFSHRPVQEKFVCLNCGFETHADEQAALNIARSWLFLRSQEYKKYQTNKTTGNTDKRAFVETWQSFYRKKLKEVWKPAV

SEQ ID NO: 49059 - protein, 978 aa, synthetic construct
  REGION 1..978: note = engineered CasX variant
QEIKRINKIRRRLVKDSNTKKAGKTGPMKTLLVRVMTPDLRERLENLRKKPENIPQPISNTSRANLNKLLTDYTEMKKAILHVYWEEFQKDPVGLMSRVAQPASKKIDQNKLKPEMDEKGNLTTAGFACSQCGQPLFVYKLEQVSEKGKAYTNYFGRCNVAEHEKLILLAQLKPEKDSDEAVTYSLGKFGQRALDFYSIHVTKESTHPVKPLAQIAGNRYASGPVGKALRDACMGTIASFLSKYQDIIIEHQKVVKGNQKRLESLRELAGKENLEYPSVTLPPQPHTKEGVDAYNEVIARVRWWVNLNLWQKLKLSRDDAKPLLRLKGFPSFPLVERQANEVDWWDMVCNVKKLINEKKEDGKVFWQNLAIYKRQEALRPYLSSEEDRKKGKKFARYQLGDLLLHLEKKHGEDWGKVYDEAWERIDKKVEGLSKHIKLEEERRSEDAQSKAALTDWLRAKASFVIEGLKEADKDEFCRCELKLQKWYGDLRGKPFAIEAENSILDISGFSKQYNCAFIWQKDGVKKLNLYLIINYFKGGKLRFKKIKPEAFEANRFYTVINKKSGEIVPMEVNFNFDDPNLIILPLAFGKRQGREFIWNDLLSLETGSLKLANGRVIEKTLYNRRTRQDEPALFVALTFERREVLDSSNIKPMNLIGVDRGENIPAVIALTDPEGCPLSRFKDSLGNPTHILRIGESYKEKQRTIQAKKEVEQRRAGGYSRKYASKAKNLADDMVRNTARDLLYYAVTQDAMLIFENLSRGFGRQGKRTFMAERQYTRMEDWLTAKLAYEGLPSKTYLSKTLAQYTSKTCSNCGFTITSADYDRVLEKLKKTATGWMTTINGKELKVEGQITYYNRYKRQNVVKDLSVELDRLSEESVNNDISSWTKGRSGEALSLLKKRFSHRPVQEKFVCLNCGFETHADEQAALNIARSWLFLRSQEYKKYQTNKTTGNTDKRAFVETWQSFYRKKLKEVWKPAV

SEQ ID NO: 49060 - protein, 978 aa, synthetic construct
  REGION 1..978: note = engineered CasX variant
QEIKRINKIRRRLVKDSNTKKAGKTGPMKTLLVRVMTPDLRERLENLRKKPENIPQPISNTSRANLNKLLTDYTEMKKAILHVYWEEFQKDPVGLMSRVAQPASKKIDQNKLKPEMDEKGNLTTAGFACSQCGQPLFVYKLEQVSEKGKAYTNYFGRCNVAEHEKLILLAQLKPEKDSDEAVTYSLGKFGQRALDFYSIHVTKESTHPVKPLAQIAGNRYASGPVGKALRDACMGTIASFLSKYQDIIIEHQKVVKGNQKRLESLRELAGKENLEYPSVTLPPQPHTKEGVDAYNEVIARVRWWVNLNLWQKLKLSRDDAKPLLRLKGFPSFPLVERQANEVDWWDMVCNVKKLINEKKEDGKVFWQNLAGYKRQEALRPYLSSEEDREKGKKFARYQLGDLLLHLEKKHGEDWGKVYDEAWERIDKKVEGLSKHIKLEEERRSEDAQSKAALTDWLRAKASFVIEGLKEADKDEFCRCELKLQKWYGDLRGKPFAIEAENSILDISGFSKQYNCAFIWQKDGVKKLNLYLIINYFKGGKLRFKKIKPEAFEANRFYTVINKKSGEIVPMEVNFNFDDPNLIILPLAFGKRQGREFIWNDLLSLETGSLKLANGRVIEKTLYNRRTRQDEPALFVALTFERREVLDSSNIKPMNLIGVDRGENIPAVIALTDPEGCPLSRFKDSLGNPTHILRIGESYKEKQRTIQAKKEVEQRRAGGYSRKYASKAKNLADDMVRNTARDLLYYAVTQDAMLIFENLSRGFGRQGKRTFMAERQYTRMEDWLTAKLAYEGLPSKTYLSKTLAQYTSKTCSNCGFTITSADYDRVLEKLKKTATGWMTTINGKELKVEGQITYYNRYKRQNVVKDLSVELDRLSEESVNNDISSWTKGRSGEALSLLKKRFSHRPVQEKFVCLNCGFETHADEQAALNIARSWLFLRSQEYKKYQTNKTTGNTDKRAFVETWQSFYRKKLKEVWKPAV

SEQ ID NO: 49061 - protein, 978 aa, synthetic construct
  REGION 1..978: note = engineered CasX variant
QEIKRINKIRRRLVKDSNTKKAGKTGPMKTLLVRVMTPDLRERLENLRKKPENIPQPISNTSRANLNKLLTDYTEMKKAILHVYWEEFQKDPVGLMSRVAQPASKKIDQNKLKPEMDEKGNLTTAGFACSQCGQPLFVYKLEQVSEKGKAYTNYFGRCNVAEHEKLILLAQLKPEKDSDEAVTYSLGKFGQRALDFYSIHVTKESTHPVKPLAQIAGNRYASGPVGKALRDACMGTIASFLSKYQDIIIEHQKVVKGNQKRLESLRELAGKENLEYPSVTLPPQPHTKEGVDAYNEVIARVRWWVNLNLWQKLKLSRDDAKPLLRLKGFPSFPLVERQANEVDWWDMVCNVKKLINEKKEDGKVFWQNLAGYKRQEALRPYLSSEEDRKKGKKFARYQLGDLLLHLEKKHGEDWGKVYDEAWERIDKKVEGLSKHIKLEEERRSEDAQSKAALTDWLRAKASFVIEGLKEADKDEFCRCELKLQKWYGDLRGKPFAIEAENSILDISGFSKQYNCAFIWQKDGVKKLNLYLIINYFKGGKLRFKKIKPEAFEANRFYTVINKKSGEIVIMEVNFNFDDPNLIILPLAFGKRQGREFIWNDLLSLETGSLKLANGRVIEKTLYNRRTRQDEPALFVALTFERREVLDSSNIKPMNLIGVDRGENIPAVIALTDPEGCPLSRFKDSLGNPTHILRIGESYKEKQRTIQAKKEVEQRRAGGYSRKYASKAKNLADDMVRNTARDLLYYAVTQDAMLIFENLSRGFGRQGKRTFMAERQYTRMEDWLTAKLAYEGLPSKTYLSKTLAQYTSKTCSNCGFTITSADYDRVLEKLKKTATGWMTTINGKELKVEGQITYYNRYKRQNVVKDLSVELDRLSEESVNNDISSWTKGRSGEALSLLKKRFSHRPVQEKFVCLNCGFETHADEQAALNIARSWLFLRSQEYKKYQTNKTTGNTDKRAFVETWQSFYRKKLKEVWKPAV

SEQ ID NO: 49062 - protein, 979 aa, synthetic construct
  REGION 1..979: note = engineered CasX variant
QEIKRINKIRRRLVKDSNTKKAGKTGPMKTLLVRVMTPDLRERLENLRKKPENIPQPISNTSRANLNKLLTDYTEMKKAILHVYWEEFQKDPVGLMSRVAQPASKKIDQNKLKPEMDEKGNLTTAGFACSQCGQPLFVYKLEQVSEKGKAYTNYFGRCNVAEHEKLILLAQLKPEKDSDEAVTYSLGKFGQRALDFYSIHVTKESTHPVKPLAQIAGNRYASGPVGKALRGACMGTIASFLSKYQDIIIEHQKVVKGNQKRLESLRELAGKENLEYPSVTLPPQPHTKEGVDAYNEVIARVRMWVNLNLWQKLKLSRDDAKPLLRLKGFPSFPLVERQQANEVDWWDMVCNVKKLINEKKEDGKVFWQNLAGYKRQEALRPYLSSEEDRKKGKKFARYQLGDLLLHLEKKHGEDWGKVYDEAWERIDKKVEGLSKHIKLEEERRSEDAQSKAALTDWLRAKASFVIEGLKEADKDEFCRCELKLQKWYGDLRGKPFAIEAENSILDISGFSKQYNCAFIWQKDGVKKLNLYLIINYFKGGKLRFKKIKPEAFEANRFYTVINKKSGEIVPMEVNFNFDDPNLIILPLAFGKRQGREFIWNDLLSLETGSLKLANGRVIEKTLYNRRTRQDEPALFVALTFERREVLDSSNIKPMNLIGVDRGENIPAVIALTDPEGCPLSRFKDSLGNPTHILRIGESYKEKQRTIQAKKEVEQRRAGGYSRKYASKAKNLADDMVRNTARDLLYYAVTQDAMLIFENLSRGFGRQGKRTFMAERQYTRMEDWLTAKLAYEGLPSKTYLSKTLAQYTSKTCSNCGFTITSADYDRVLEKLKKTATGWMTTINGKELKVEGQITYYNRYKRQNVVKDLSVELDRLSEESVNNDISSWTKGRSGEALSLLKKRFSHRPVQEKFVCLNCGFETHADEQAALNIARSWLFLRSQEYKKYQTNKTTGNTDKRAFVETWQSFYRKKLKEVWKPAV

SEQ ID NO: 49063 - protein, 979 aa, synthetic construct
  REGION 1..979: note = engineered CasX variant
QEIKRINKIRRRLVKDSNTKKAGKTGPMKTLLVRVMTPDLRERLENLRKKPENIPQPISNTSRANLNKLLTDYTEMKKAILHVYWEEFQKDPVGLMSRVAQPASKKIDQNKLKPEMDEKGNLTTAGFACSQCGQPLFVYKLEQVSEKGKAYTNYFGRCNVAEHEKLILLAQLKPEKDSDEAVTYSLGKFGQRALDFYSIHVTKESTHPVKPLAQIAGNRYASGPVGKALRDACMGTIASFLSKYQDIIIEHQKVVKGNQKRLESLRELAGKENLEYPSVTLPPQPHTKEGVDAYNEVIARVRMWVNLNLWQKLKLSRDDAKPLLRLKNFPSFPLVERQQANEVDWWDMVCNVKKLINEKKEDGKVFWQNLAGYKRQEALRPYLSSEEDRKKGKKFARYQLGDLLLHLEKKHGEDWGKVYDEAWERIDKKVEGLSKHIKLEEERRSEDAQSKAALTDWLRAKASFVIEGLKEADKDEFCRCELKLQKWYGDLRGKPFAIEAENSILDISGFSKQYNCAFIWQKDGVKKLNLYLIINYFKGGKLRFKKIKPEAFEANRFYTVINKKSGEIVPMEVNFNFDDPNLIILPLAFGKRQGREFIWNDLLSLETGSLKLANGRVIEKTLYNRRTRQDEPALFVALTFERREVLDSSNIKPMNLIGVDRGENIPAVIALTDPEGCPLSRFKDSLGNPTHILRIGESYKEKQRTIQAKKEVEQRRAGGYSRKYASKAKNLADDMVRNTARDLLYYAVTQDAMLIFENLSRGFGRQGKRTFMAERQYTRMEDWLTAKLAYEGLPSKTYLSKTLAQYTSKTCSNCGFTITSADYDRVLEKLKKTATGWMTTINGKELKVEGQITYYNRYKRQNVVKDLSVELDRLSEESVNNDISSWTKGRSGEALSLLKKRFSHRPVQEKFVCLNCGFETHADEQAALNIARSWLFLRSQEYKKYQTNKTTGNTDKRAFVETWQSFYRKKLKEVWKPAV

SEQ ID NO: 49064 - protein, 979 aa, synthetic construct
  REGION 1..979: note = engineered CasX variant
QEIKRINKIRRRLVKDSNTKKAGKTGPMKTLLVRVMTPDLRERLENLRKKPENIPQPISNTSRANLNKLLTDYTEMKKAILHVYWEEFQKDPVGLMSRVAQPASKKIDQNKLKPEMDEKGNLTTAGFACSQCGQPLFVYKLEQVSEKGKAYTNYFGRCNVAEHEKLILLAQLKPEKDSDEAVTYSLGKFGQRALDFYSIHVTKESTHPVKPLAQIAGNRYASGPVGKALRDACMGTIASFLSKYQDIIIEHQKVVKGNQKRLESLRELAGKENLEYPSVTLPPQPHTKEGVDAYNEVIARVRMWVNLNLWQKLKLSRDDAKPLLRLKGFPSFPLVERQQANEVDWWDMVCNVKKLINEKKEDGKVFWQNLAGYKRQEALRPYLSSEEDRKKGKKFARYQLGDLLNHLEKKHGEDWGKVYDEAWERIDKKVEGLSKHIKLEEERRSEDAQSKAALTDWLRAKASFVIEGLKEADKDEFCRCELKLQKWYGDLRGKPFAIEAENSILDISGFSKQYNCAFIWQKDGVKKLNLYLIINYFKGGKLRFKKIKPEAFEANRFYTVINKKSGEIVPMEVNFNFDDPNLIILPLAFGKRQGREFIWNDLLSLETGSLKLANGRVIEKTLYNRRTRQDEPALFVALTFERREVLDSSNIKPMNLIGVDRGENIPAVIALTDPEGCPLSRFKDSLGNPTHILRIGESYKEKQRTIQAKKEVEQRRAGGYSRKYASKAKNLADDMVRNTARDLLYYAVTQDAMLIFENLSRGFGRQGKRTFMAERQYTRMEDWLTAKLAYEGLPSKTYLSKTLAQYTSKTCSNCGFTITSADYDRVLEKLKKTATGWMTTINGKELKVEGQITYYNRYKRQNVVKDLSVELDRLSEESVNNDISSWTKGRSGEALSLLKKRFSHRPVQEKFVCLNCGFETHADEQAALNIARSWLFLRSQEYKKYQTNKTTGNTDKRAFVETWQSFYRKKLKEVWKPAV

SEQ ID NO: 49065 - protein, 979 aa, synthetic construct
  REGION 1..979: note = engineered CasX variant
QEIKRINKIRRRLVKDSNTKKAGKTGPMKTLLVRVMTPDLRERLENLRKKPENIPQPISNTSRANLNKLLTDYTEMKKAILHVYWEEFQKDPVGLMSRVAQPASKKIDQNKLKPEMDEKGNLTTAGFACSQCGQPLFVYKLEQVSEKGKAYTNYFGRCNVAEHEKLILLAQLKPEKDSDEAVTYSLGKFGQRALDFYSIHVTKESTHPVKPLAQIAGNRYASGPVGKALRDACMGTIASFLSKYQDIIIEHQKVVKGNQKRLESLRELAGKENLEYPSVTLPPQPHTKEGVDAYNEVIARVRMWVNLNLWQKLKLSRDDAKPLLRLKGFPSFPLVERQQANEVDWWDMVCNVKKLINEKKEDGKVFWQNLAGYKRQEALRPYLSSEEDRKKGKKFARYQLGDLLWHLEKKHGEDWGKVYDEAWERIDKKVEGLSKHIKLEEERRSEDAQSKAALTDWLRAKASFVIEGLKEADKDEFCRCELKLQKWYGDLRGKPFAIEAENSILDISGFSKQYNCAFIWQKDGVKKLNLYLIINYFKGGKLRFKKIKPEAFEANRFYTVINKKSGEIVPMEVNFNFDDPNLIILPLAFGKRQGREFIWNDLLSLETGSLKLANGRVIEKTLYNRRTRQDEPALFVALTFERREVLDSSNIKPMNLIGVDRGENIPAVIALTDPEGCPLSRFKDSLGNPTHILRIGESYKEKQRTIQAKKEVEQRRAGGYSRKYASKAKNLADDMVRNTARDLLYYAVTQDAMLIFENLSRGFGRQGKRTFMAERQYTRMEDWLTAKLAYEGLPSKTYLSKTLAQYTSKTCSNCGFTITSADYDRVLEKLKKTATGWMTTINGKELKVEGQITYYNRYKRQNVVKDLSVELDRLSEESVNNDISSWTKGRSGEALSLLKKRFSHRPVQEKFVCLNCGFETHADEQAALNIARSWLFLRSQEYKKYQTNKTTGNTDKRAFVETWQSFYRKKLKEVWKPAV

SEQ ID NO: 49066 - protein, 979 aa, synthetic construct
  REGION 1..979: note = engineered CasX variant
QEIKRINKIRRRLVKDSNTKKAGKTGPMKTLLVRVMTPDLRERLENLRKKPENIPQPISNTSRANLNKLLTDYTEMKKAILHVYWEEFQKDPVGLMSRVAQPASKKIDQNKLKPEMDEKGNLTTAGFACSQCGQPLFVYKLEQVSEKGKAYTNYFGRCNVAEHEKLILLAQLKPEKDSDEAVTYSLGKFGQRALDFYSIHVTKESTHPVKPLAQIAGNRYASGPVGKALRDACMGTIASFLSKYQDIIIEHQKVVKGNQKRLESLRELAGKENLEYPSVTLPPQPHTKEGVDAYNEVIARVRMWVNLNLWQKLKLSRDDAKPLLRLKGFPSFPLVERQQANEVDWWDMVCNVKKLINEKKEDGKVFWQNLAGYKRQEALRPYLSSEEDRKKGKKFARYQLGDLLLHLYKKHGEDWGKVYDEAWERIDKKVEGLSKHIKLEEERRSEDAQSKAALTDWLRAKASFVIEGLKEADKDEFCRCELKLQKWYGDLRGKPFAIEAENSILDISGFSKQYNCAFIWQKDGVKKLNLYLIINYFKGGKLRFKKIKPEAFEANRFYTVINKKSGEIVPMEVNFNFDDPNLIILPLAFGKRQGREFIWNDLLSLETGSLKLANGRVIEKTLYNRRTRQDEPALFVALTFERREVLDSSNIKPMNLIGVDRGENIPAVIALTDPEGCPLSRFKDSLGNPTHILRIGESYKEKQRTIQAKKEVEQRRAGGYSRKYASKAKNLADDMVRNTARDLLYYAVTQDAMLIFENLSRGFGRQGKRTFMAERQYTRMEDWLTAKLAYEGLPSKTYLSKTLAQYTSKTCSNCGFTITSADYDRVLEKLKKTATGWMTTINGKELKVEGQITYYNRYKRQNVVKDLSVELDRLSEESVNNDISSWTKGRSGEALSLLKKRFSHRPVQEKFVCLNCGFETHADEQAALNIARSWLFLRSQEYKKYQTNKTTGNTDKRAFVETWQSFYRKKLKEVWKPAV

SEQ ID NO: 49067 - protein, 979 aa, synthetic construct
  REGION 1..979: note = engineered CasX variant
QEIKRINKIRRRLVKDSNTKKAGKTGPMKTLLVRVMTPDLRERLENLRKKPENIPQPISNTSRANLNKLLTDYTEMKKAILHVYWEEFQKDPVGLMSRVAQPASKKIDQNKLKPEMDEKGNLTTAGFACSQCGQPLFVYKLEQVSEKGKAYTNYFGRCNVAEHEKLILLAQLKPEKDSDEAVTYSLGKFGQRALDFYSIHVTKESTHPVKPLAQIAGNRYASGPVGKALRDACMGTIASFLSKYQDIIIEHQKVVKGNQKRLESLRELAGKENLEYPSVTLPPQPHTKEGVDAYNEVIARVRMWVNLNLWQKLKLSRDDAKPLLRLKGFPSFPLVERQQANEVDWWDMVCNVKKLINEKKEDGKVFWQNLAGYKRQEALRPYLSSEEDRKKGKKFARYQLGDLLLHLEKKHPEDWGKVYDEAWERIDKKVEGLSKHIKLEEERRSEDAQSKAALTDWLRAKASFVIEGLKEADKDEFCRCELKLQKWYGDLRGKPFAIEAENSILDISGFSKQYNCAFIWQKDGVKKLNLYLIINYFKGGKLRFKKIKPEAFEANRFYTVINKKSGEIVPMEVNFNFDDPNLIILPLAFGKRQGREFIWNDLLSLETGSLKLANGRVIEKTLYNRRTRQDEPALFVALTFERREVLDSSNIKPMNLIGVDRGENIPAVIALTDPEGCPLSRFKDSLGNPTHILRIGESYKEKQRTIQAKKEVEQRRAGGYSRKYASKAKNLADDMVRNTARDLLYYAVTQDAMLIFENLSRGFGRQGKRTFMAERQYTRMEDWLTAKLAYEGLPSKTYLSKTLAQYTSKTCSNCGFTITSADYDRVLEKLKKTATGWMTTINGKELKVEGQITYYNRYKRQNVVKDLSVELDRLSEESVNNDISSWTKGRSGEALSLLKKRFSHRPVQEKFVCLNCGFETHADEQAALNIARSWLFLRSQEYKKYQTNKTTGNTDKRAFVETWQSFYRKKLKEVWKPAV

SEQ ID NO: 49068 - protein, 980 aa, synthetic construct
  REGION 1..980: note = engineered CasX variant
QEIKRINKIRRRLVKDSNTKKAGKTGPMKTLLVRVMTPDLRERLENLRKKPENIPQPISNTSRANLNKLLTDYTEMKKAILHVYWEEFQKDPVGLMSRVAQPASKKIDQNKLKPEMDEKGNLTTAGFACSQCGQPLFVYKLEQVSEKGKAYTNYFGRCNVAEHEKLILLAQLKPEKDSDEAVTYSLGKFGQRALDFYSIHVTKESTHPVKPLAQIAGNRYASGPVGKALRDACMGTIASFLSKYQDIIIEHQKVVKGNQKRLESLRELAGKENLEYPSVTLPPQPHTKEGVDAYNEVIARVRMWVNLNLWQKLKLSRDDAKPLLRLKGFPSFPLVERQQANEVDWWDMVCNVKKLINEKKEDGKVFWQNLAGYKRQEALRPYLSSEEDRKKGKKFARYQLGDLLLHLEKKHGERDWGKVYDEAWERIDKKVEGLSKHIKLEEERRSEDAQSKAALTDWLRAKASFVIEGLKEADKDEFCRCELKLQKWYGDLRGKPFAIEAENSILDISGFSKQYNCAFIWQKDGVKKLNLYLIINYFKGGKLRFKKIKPEAFEANRFYTVINKKSGEIVPMEVNFNFDDPNLIILPLAFGKRQGREFIWNDLLSLETGSLKLANGRVIEKTLYNRRTRQDEPALFVALTFERREVLDSSNIKPMNLIGVDRGENIPAVIALTDPEGCPLSRFKDSLGNPTHILRIGESYKEKQRTIQAKKEVEQRRAGGYSRKYASKAKNLADDMVRNTARDLLYYAVTQDAMLIFENLSRGFGRQGKRTFMAERQYTRMEDWLTAKLAYEGLPSKTYLSKTLAQYTSKTCSNCGFTITSADYDRVLEKLKKTATGWMTTINGKELKVEGQITYYNRYKRQNVVKDLSVELDRLSEESVNNDISSWTKGRSGEALSLLKKRFSHRPVQEKFVCLNCGFETHADEQAALNIARSWLFLRSQEYKKYQTNKTTGNTDKRAFVETWQSFYRKKLKEVWKPAV

SEQ ID NO: 49069 - protein, 980 aa, synthetic construct
  REGION 1..980: note = engineered CasX variant
QEIKRINKIRRRLVKDSNTKKAGKTGPMKTLLVRVMTPDLRERLENLRKKPENIPQPISNTSRANLNKLLTDYTEMKKAILHVYWEEFQKDPVGLMSRVAQPASKKIDQNKLKPEMDEKGNLTTAGFACSQCGQPLFVYKLEQVSEKGKAYTNYFGRCNVAEHEKLILLAQLKPEKDSDEAVTYSLGKFGQRALDFYSIHVTKESTHPVKPLAQIAGNRYASGPVGKALRDACMGTIASFLSKYQDIIIEHQKVVKGNQKRLESLRELAGKENLEYPSVTLPPQPHTKEGVDAYNEVIARVRMWVNLNLWQKLKLSRDDAKPLLRLKGFPSFPLVERQQANEVDWWDMVCNVKKLINEKKEDGKVFWQNLAGYKRQEALRPYLSSEEDRKKGKKFARYQLGDLLLHLEKKHGEYDWGKVYDEAWERIDKKVEGLSKHIKLEEERRSEDAQSKAALTDWLRAKASFVIEGLKEADKDEFCRCELKLQKWYGDLRGKPFAIEAENSILDISGFSKQYNCAFIWQKDGVKKLNLYLIINYFKGGKLRFKKIKPEAFEANRFYTVINKKSGEIVPMEVNFNFDDPNLIILPLAFGKRQGREFIWNDLLSLETGSLKLANGRVIEKTLYNRRTRQDEPALFVALTFERREVLDSSNIKPMNLIGVDRGENIPAVIALTDPEGCPLSRFKDSLGNPTHILRIGESYKEKQRTIQAKKEVEQRRAGGYSRKYASKAKNLADDMVRNTARDLLYYAVTQDAMLIFENLSRGFGRQGKRTFMAERQYTRMEDWLTAKLAYEGLPSKTYLSKTLAQYTSKTCSNCGFTITSADYDRVLEKLKKTATGWMTTINGKELKVEGQITYYNRYKRQNVVKDLSVELDRLSEESVNNDISSWTKGRSGEALSLLKKRFSHRPVQEKFVCLNCGFETHADEQAALNIARSWLFLRSQEYKKYQTNKTTGNTDKRAFVETWQSFYRKKLKEVWKPAV

SEQ ID NO: 49070 - protein, 979 aa, synthetic construct
  REGION 1..979: note = engineered CasX variant
QEIKRINKIRRRLVKDSNTKKAGKTGPMKTLLVRVMTPDLRERLENLRKKPENIPQPISNTSRANLNKLLTDYTEMKKAILHVYWEEFQKDPVGLMSRVAQPASKKIDQNKLKPEMDEKGNLTTAGFACSQCGQPLFVYKLEQVSEKGKAYTNYFGRCNVAEHEKLILLAQLKPEKDSDEAVTYSLGKFGQRALDFYSIHVTKESTHPVKPLAQIAGNRYASGPVGKALRDACMGTIASFLSKYQDIIIEHQKVVKGNQKRLESLRELAGKENLEYPSVTLPPQPHTKEGVDAYNEVIARVRMWVNLNLWQKLKLSRDDAKPLLRLKGFPSFPLVERQQANEVDWWDMVCNVKKLINEKKEDGKVFWQNLAGYKRQEALRPYLSSEEDRKKGKKFARYQLGDLLLHLEKKHGEDWGDVYDEAWERIDKKVEGLSKHIKLEEERRSEDAQSKAALTDWLRAKASFVIEGLKEADKDEFCRCELKLQKWYGDLRGKPFAIEAENSILDISGFSKQYNCAFIWQKDGVKKLNLYLIINYFKGGKLRFKKIKPEAFEANRFYTVINKKSGEIVPMEVNFNFDDPNLIILPLAFGKRQGREFIWNDLLSLETGSLKLANGRVIEKTLYNRRTRQDEPALFVALTFERREVLDSSNIKPMNLIGVDRGENIPAVIALTDPEGCPLSRFKDSLGNPTHILRIGESYKEKQRTIQAKKEVEQRRAGGYSRKYASKAKNLADDMVRNTARDLLYYAVTQDAMLIFENLSRGFGRQGKRTFMAERQYTRMEDWLTAKLAYEGLPSKTYLSKTLAQYTSKTCSNCGFTITSADYDRVLEKLKKTATGWMTTINGKELKVEGQITYYNRYKRQNVVKDLSVELDRLSEESVNNDISSWTKGRSGEALSLLKKRFSHRPVQEKFVCLNCGFETHADEQAALNIARSWLFLRSQEYKKYQTNKTTGNTDKRAFVETWQSFYRKKLKEVWKPAV

SEQ ID NO: 49071 - protein, 979 aa, synthetic construct
  REGION 1..979: note = engineered CasX variant
QEIKRINKIRRRLVKDSNTKKAGKTGPMKTLLVRVMTPDLRERLENLRKKPENIPQPISNTSRANLNKLLTDYTEMKKAILHVYWEEFQKDPVGLMSRVAQPASKKIDQNKLKPEMDEKGNLTTAGFACSQCGQPLFVYKLEQVSEKGKAYTNYFGRCNVAEHEKLILLAQLKPEKDSDEAVTYSLGKFGQRALDFYSIHVTKESTHPVKPLAQIAGNRYASGPVGKALRDACMGTIASFLSKYQDIIIEHQKVVKGNQKRLESLRELAGKENLEYPSVTLPPQPHTKEGVDAYNEVIARVRMWVNLNLWQKLKLSRDDAKPLLRLKGFPSFPLVERQQANEVDWWDMVCNVKKLINEKKEDGKVFWQNLAGYKRQEALRPYLSSEEDRKKGKKFARYQLGDLLLHLEKKHGEDWGKVYGEAWERIDKKVEGLSKHIKLEEERRSEDAQSKAALTDWLRAKASFVIEGLKEADKDEFCRCELKLQKWYGDLRGKPFAIEAENSILDISGFSKQYNCAFIWQKDGVKKLNLYLIINYFKGGKLRFKKIKPEAFEANRFYTVINKKSGEIVPMEVNFNFDDPNLIILPLAFGKRQGREFIWNDLLSLETGSLKLANGRVIEKTLYNRRTRQDEPALFVALTFERREVLDSSNIKPMNLIGVDRGENIPAVIALTDPEGCPLSRFKDSLGNPTHILRIGESYKEKQRTIQAKKEVEQRRAGGYSRKYASKAKNLADDMVRNTARDLLYYAVTQDAMLIFENLSRGFGRQGKRTFMAERQYTRMEDWLTAKLAYEGLPSKTYLSKTLAQYTSKTCSNCGFTITSADYDRVLEKLKKTATGWMTTINGKELKVEGQITYYNRYKRQNVVKDLSVELDRLSEESVNNDISSWTKGRSGEALSLLKKRFSHRPVQEKFVCLNCGFETHADEQAALNIARSWLFLRSQEYKKYQTNKTTGNTDKRAFVETWQSFYRKKLKEVWKPAV

SEQ ID NO: 49072 - protein, 979 aa, synthetic construct
  REGION 1..979: note = engineered CasX variant
QEIKRINKIRRRLVKDSNTKKAGKTGPMKTLLVRVMTPDLRERLENLRKKPENIPQPISNTSRANLNKLLTDYTEMKKAILHVYWEEFQKDPVGLMSRVAQPASKKIDQNKLKPEMDEKGNLTTAGFACSQCGQPLFVYKLEQVSEKGKAYTNYFGRCNVAEHEKLILLAQLKPEKDSDEAVTYSLGKFGQRALDFYSIHVTKESTHPVKPLAQIAGNRYASGPVGKALRDACMGTIASFLSKYQDIIIEHQKVVKGNQKRLESLRELAGKENLEYPSVTLPPQPHTKEGVDAYNEVIARVRMWVNLNLWQKLKLSRDDAKPLLRLKGFPSFPLVERQQANEVDWWDMVCNVKKLINEKKEDGKVFWQNLAGYKRQEALRPYLSSEEDRKKGKKFARYQLGDLLLHLEKKHGEDWGKVYDEAWERIDKKVEGLSKHIKLEEERRSEDAQSKAALTDWLRAKASFVIEGKKEADKDEFCRCELKLQKWYGDLRGKPFAIEAENSILDISGFSKQYNCAFIWQKDGVKKLNLYLIINYFKGGKLRFKKIKPEAFEANRFYTVINKKSGEIVPMEVNFNFDDPNLIILPLAFGKRQGREFIWNDLLSLETGSLKLANGRVIEKTLYNRRTRQDEPALFVALTFERREVLDSSNIKPMNLIGVDRGENIPAVIALTDPEGCPLSRFKDSLGNPTHILRIGESYKEKQRTIQAKKEVEQRRAGGYSRKYASKAKNLADDMVRNTARDLLYYAVTQDAMLIFENLSRGFGRQGKRTFMAERQYTRMEDWLTAKLAYEGLPSKTYLSKTLAQYTSKTCSNCGFTITSADYDRVLEKLKKTATGWMTTINGKELKVEGQITYYNRYKRQNVVKDLSVELDRLSEESVNNDISSWTKGRSGEALSLLKKRFSHRPVQEKFVCLNCGFETHADEQAALNIARSWLFLRSQEYKKYQTNKTTGNTDKRAFVETWQSFYRKKLKEVWKPAV

SEQ ID NO: 49073 - protein, 979 aa, synthetic construct
  REGION 1..979: note = engineered CasX variant
QEIKRINKIRRRLVKDSNTKKAGKTGPMKTLLVRVMTPDLRERLENLRKKPENIPQPISNTSRANLNKLLTDYTEMKKAILHVYWEEFQKDPVGLMSRVAQPASKKIDQNKLKPEMDEKGNLTTAGFACSQCGQPLFVYKLEQVSEKGKAYTNYFGRCNVAEHEKLILLAQLKPEKDSDEAVTYSLGKFGQRALDFYSIHVTKESTHPVKPLAQIAGNRYASGPVGKALRDACMGTIASFLSKYQDIIIEHQKVVKGNQKRLESLRELAGKENLEYPSVTLPPQPHTKEGVDAYNEVIARVRMWVNLNLWQKLKLSRDDAKPLLRLKGFPSFPLVERQQANEVDWWDMVCNVKKLINEKKEDGKVFWQNLAGYKRQEALRPYLSSEEDRKKGKKFARYQLGDLLLHLEKKHGEDWGKVYDEAWERIDKKVEGLSKHIKLEEERRSEDAQSKAALTDWLRAKASFVIEGSKEADKDEFCRCELKLQKWYGDLRGKPFAIEAENSILDISGFSKQYNCAFIWQKDGVKKLNLYLIINYFKGGKLRFKKIKPEAFEANRFYTVINKKSGEIVPMEVNFNFDDPNLIILPLAFGKRQGREFIWNDLLSLETGSLKLANGRVIEKTLYNRRTRQDEPALFVALTFERREVLDSSNIKPMNLIGVDRGENIPAVIALTDPEGCPLSRFKDSLGNPTHILRIGESYKEKQRTIQAKKEVEQRRAGGYSRKYASKAKNLADDMVRNTARDLLYYAVTQDAMLIFENLSRGFGRQGKRTFMAERQYTRMEDWLTAKLAYEGLPSKTYLSKTLAQYTSKTCSNCGFTITSADYDRVLEKLKKTATGWMTTINGKELKVEGQITYYNRYKRQNVVKDLSVELDRLSEESVNNDISSWTKGRSGEALSLLKKRFSHRPVQEKFVCLNCGFETHADEQAALNIARSWLFLRSQEYKKYQTNKTTGNTDKRAFVETWQSFYRKKLKEVWKPAV

SEQ ID NO: 49074 - protein, 980 aa, synthetic construct
  REGION 1..980: note = engineered CasX variant
QEIKRINKIRRRLVKDSNTKKAGKTGPMKTLLVRVMTPDLRERLENLRKKPENIPQPISNTSRANLNKLLTDYTEMKKAILHVYWEEFQKDPVGLMSRVAQPASKKIDQNKLKPEMDEKGNLTTAGFACSQCGQPLFVYKLEQVSEKGKAYTNYFGRCNVAEHEKLILLAQLKPEKDSDEAVTYSLGKFGQRALDFYSIHVTKESTHPVKPLAQIAGNRYASGPVGKALRDACMGTIASFLSKYQDIIIEHQKVVKGNQKRLESLRELAGKENLEYPSVTLPPQPHTKEGVDAYNEVIARVRMWVNLNLWQKLKLSRDDAKPLLRLKGFPSFPLVERQQANEVDWWDMVCNVKKLINEKKEDGKVFWQNLAGYKRQEALRPYLSSEEDRKKGKKFARYQLGDLLLHLEKKHGEDWGKVYDEAWERIDKKVEGLSKHIKLEEERRSEDAQSKAALTDWLRAKASFVIEGLKEADDKDEFCRCELKLQKWYGDLRGKPFAIEAENSILDISGFSKQYNCAFIWQKDGVKKLNLYLIINYFKGGKLRFKKIKPEAFEANRFYTVINKKSGEIVPMEVNFNFDDPNLIILPLAFGKRQGREFIWNDLLSLETGSLKLANGRVIEKTLYNRRTRQDEPALFVALTFERREVLDSSNIKPMNLIGVDRGENIPAVIALTDPEGCPLSRFKDSLGNPTHILRIGESYKEKQRTIQAKKEVEQRRAGGYSRKYASKAKNLADDMVRNTARDLLYYAVTQDAMLIFENLSRGFGRQGKRTFMAERQYTRMEDWLTAKLAYEGLPSKTYLSKTLAQYTSKTCSNCGFTITSADYDRVLEKLKKTATGWMTTINGKELKVEGQITYYNRYKRQNVVKDLSVELDRLSEESVNNDISSWTKGRSGEALSLLKKRFSHRPVQEKFVCLNCGFETHADEQAALNIARSWLFLRSQEYKKYQTNKTTGNTDKRAFVETWQSFYRKKLKEVWKPAV

SEQ ID NO: 49075 - protein, 980 aa, synthetic construct
  REGION 1..980: note = engineered CasX variant
QEIKRINKIRRRLVKDSNTKKAGKTGPMKTLLVRVMTPDLRERLENLRKKPENIPQPISNTSRANLNKLLTDYTEMKKAILHVYWEEFQKDPVGLMSRVAQPASKKIDQNKLKPEMDEKGNLTTAGFACSQCGQPLFVYKLEQVSEKGKAYTNYFGRCNVAEHEKLILLAQLKPEKDSDEAVTYSLGKFGQRALDFYSIHVTKESTHPVKPLAQIAGNRYASGPVGKALRDACMGTIASFLSKYQDIIIEHQKVVKGNQKRLESLRELAGKENLEYPSVTLPPQPHTKEGVDAYNEVIARVRMWVNLNLWQKLKLSRDDAKPLLRLKGFPSFPLVERQQANEVDWWDMVCNVKKLINEKKEDGKVFWQNLAGYKRQEALRPYLSSEEDRKKGKKFARYQLGDLLLHLEKKHGEDWGKVYDEAWERIDKKVEGLSKHIKLEEERRSEDAQSKAALTDWLRAKASFVIEGLKEADKDEFCRCELKLQKWYGDLRGKPFAIEAENSILDISGFSKQYNCAFIWQKDGVKKLNLYLIINYFKGGKLRFKKIKPEAFEANRFYTVINKKSGEIVPMEVNFNFDDPNLIILPLAFGKRQGREFIWNDLLSLETGSLKLANGRVIEKTLYNRRTRQDEPALFVALTFERREVLDSSNIKPMNLIGVDRGENIPAVIALTDPEGCPLSRFKDSLGNPTHILRIGESYKEKQRTIQAKKEVEQRRAGGYSRKYASKAKNLADDMVRNTARDLLYYAVTQDAMLIFENLSRGFGRQGKRTFMAERQYTRMEDWLTAKLAYEGLPSKTYLSKTLAQYTSKTCSNCGFTITSADYDRVLEKLKKTATGWMTTINGKELKVEGQITYYNRYKRQNVVKDLSVELDRLSEESVNNDISSWTKGRSGNEALSLLKKRFSHRPVQEKFVCLNCGFETHADEQAALNIARSWLFLRSQEYKKYQTNKTTGNTDKRAFVETWQSFYRKKLKEVWKPAV

SEQ ID NO: 49076 - protein, 979 aa, synthetic construct
  REGION 1..979: note = engineered CasX variant
QEIKRINKIRRRLVKDSNTKKAGKTGPMKTLLVRVMTPDLRERLENLRKKPENIPQPISNTSRANLNKLLTDYTEMKKAILHVYWEEFQKDPVGLMSRVAQPASKKIDQNKLKPEMDEKGNLTTAGFACSQCGQPLFVYKLEQVSEKGKAYTNYFGRCNVAEHEKLILLAQLKPEKDSDEAVTYSLGKFGQRALDFYSIHVTKESTHPVKPLAQIAGNRYASGPVGKALRDACMGTIASFLSKYQDIIIEHQKVVKGNQKRLESLRELAGKENLEYPSVTLPPQPHTKEGVDAYNEVIARVRMWVNLNLWQKLKLSRDDAKPLLRLKGFPSFPLVERQQANEVDWWDMVCNVKKLINEKKEDGKVFWQNLAGYKRQEALRPYLSSEEDRQKGKKFARYQLGDLLLHLEKKHGEDWGKVYDEAWERIDKKVEGLSKHIKLEEERRSEDAQSKAALTDWLRAKASFVIEGLKEADKDEFCRCELKLQKWYGDLRGKPFAIEAENSILDISGFSKQYNCAFIWQKDGVKKLNLYLIINYFKGGKLRFKKIKPEAFEANRFYTVINKKSGEIVPMEVNFNFDDPNLIILPLAFGKRQGREFIWNDLLSLETGSLKLANGRVIEKTLYNRRTRQDEPALFVALTFERREVLDSSNIKPMNLIGVDRGENIPAVIALTDPEGCPLSRFKDSLGNPTHILRIGESYKEKQRTIQAKKEVEQRRAGGYSRKYASKAKNLADDMVRNTARDLLYYAVTQDAMLIFENLSRGFGRQGKRTFMAERQYTRMEDWLTAKLAYEGLPSKTYLSKTLAQYTSKTCSNCGFTITSADYDRVLEKLKKTATGWMTTINGKELKVEGQITYYNRYKRQNVVKDLSVELDRLSEESVNNDISSWTKGRSGEALSLLKKRFSHRPVQEKFVCLNCGFETHADEQAALNIARSWLFLRSQEYKKYQTNKTTGNTDKRAFVETWQSFYRKKLKEVWKPAV

SEQ ID NO: 49077 - protein, 979 aa, synthetic construct
  REGION 1..979: note = engineered CasX variant
QEIKRINKIRRRLVKDSNTKKAGKTGPMKTLLVRVMTPDLRERLENLRKKPENIPQPISNTSRANLNKLLTDYTEMKKAILHVYWEEFQKDPVGLMSRVAQPASKKIDQNKLKPEMDEKGNLTTAGFACSQCGQPLFVYKLEQVSEKGKAYTNYFGRCNVAEHEKLILLAQLKPEKDSDEAVTYSLGKFGQRALDFYSIHVTKESTHPVKPLAQIAGNRYASGPVGKALRDACMGTIASFLSKYQDIIIEHQKVVKGNQKRLESLRELAGKENLEYPSVTLPPQPHTKEGVDAYNEVIARVRMWVNLNLWQKLKLSRDDAKPLLRLKGFPSFPLVERQQANEVDWWDMVCNVKKLINEKKEDGKVFWQNLAGYKRQEALRPYLSSEEDRKKGKKFARYQLGDLLLHLEKKHGEDWGKVYDEAWERIDKKVEGLSKHIKLEEERRSEDAQSKAALTDWLRAKASFVIEGLKEADKDEFCRCELKLQKWYGDLRGKPFAIEAENSILDISGFSKQYNCAFIWQKDGVKKLNLYLIINYFKGGKLRFKKIKPEAFEANRFYTVINKKSGEIVPMEVNFNFDDPNLIILPLAFGKRQGREFIWNDLLSLETGSLKLANGRVIEKTLYNRRTRQDEPALFVALTFERREVLDSSNIKPMNLIGVDRGENIPAVIALTDPEGCPLSRFKDSLGNPTHILRIGESYKEKQRTIQAKKEVEQRRAGGYSRKYASKAKNLADDMVRNTARDLLYYAVTQDAMLIFENLSRGFGRQGKRTFMAERQYTRMEDWLTAKLAYEGLPSQTYLSKTLAQYTSKTCSNCGFTITSADYDRVLEKLKKTATGWMTTINGKELKVEGQITYYNRYKRQNVVKDLSVELDRLSEESVNNDISSWTKGRSGEALSLLKKRFSHRPVQEKFVCLNCGFETHADEQAALNIARSWLFLRSQEYKKYQTNKTTGNTDKRAFVETWQSFYRKKLKEVWKPAV

SEQ ID NO: 49078 - protein, 979 aa, synthetic construct
  REGION 1..979: note = engineered CasX variant
QEIKRINKIRRRLVKDSNTKKAGKTGPMKTLLVRVMTPDLRERLENLRKKPENIPQPISNTSRANLNKLLTDYTEMKKAILHVYWEEFQKDPVGLMSRVAQPASKKIDQNKLKPEMDEKGNLTTAGFACSQCGQPLFVYKLEQVSEKGKAYTNYFGRCNVAEHEKLILLAQLKPEKDSDEAVTYSLGKFGQRALDFYSIHVTKESTHPVKPLAQIAGNRYASGPVGKALRDACMGTIASFLSKYQDIIIEHQKVVKGNQKRLESLRELAGKENLEYPSVTLPPQPHTKEGVDAYNEVIARVRMWVNLNLWQKLKLSRDDAKPLLRLKGFPSFPLVERQQANEVDWWDMVCNVKKLINEKKEDGKVFWQNLAGYKRQEALRPYLSSEEDRKKGKKFARYQLGDLLLHLEKKHGEDWGKVYDEAWERIDKKVEGLSKHIKLEEERRSEDAQSKAALTDWLRAKASFVIEGLKEADKDEFCRCELKLQKWYGDLRGKPFAIEAENSILDISGFSKQYNCAFIWQKDGVKKLNLYLIINYFKGGKLRFKKIKPEAFEANRFYTVINKKSGEIVPMEVNFNFDDPNLIILPLAFGKRQGREFIWNDLLSLETGSLKLANGRVIEKTLYNRRTRQDEPALFVALTFERREVLDSSNIKPMNLIGVDRGENIPAVIALTDPEGCPLSRFKDSLGNPTHILRIGESYKEKQRTIQAKKEVEQRRAGGYSRKYASKAKNLADDMVRNTARDLLYYAVTQDAMLIFENLSRGFGRQGKRTFMAERQYTRMEDWLTAKLAYNGLPSKTYLSKTLAQYTSKTCSNCGFTITSADYDRVLEKLKKTATGWMTTINGKELKVEGQITYYNRYKRQNVVKDLSVELDRLSEESVNNDISSWTKGRSGEALSLLKKRFSHRPVQEKFVCLNCGFETHADEQAALNIARSWLFLRSQEYKKYQTNKTTGNTDKRAFVETWQSFYRKKLKEVWKPAV

SEQ ID NO: 49079 - protein, 979 aa, synthetic construct
  REGION 1..979: note = engineered CasX variant
QEIKRINKIRRRLVKDSNTKKAGKTGPMKTLLVRVMTPDLRERLENLRKKPENIPQPISNTSRANLNKLLTDYTEMKKAILHVYWEEFQKDPVGLMSRVAQPASKKIDQNKLKPEMDEKGNLTTAGFACSQCGQPLFVYKLEQVSEKGKAYTNYFGRCNVAEHEKLIQLAQLKPEKDSDEAVTYSLGKFGQRALDFYSIHVTKESTHPVKPLAQIAGNRYASGPVGKALRDACMGTIASFLSKYQDIIIEHQKVVKGNQKRLESLRELAGKENLEYPSVTLPPQPHTKEGVDAYNEVIARVRMWVNLNLWQKLKLSRDDAKPLLRLKGFPSFPLVERQQANEVDWWDMVCNVKKLINEKKEDGKVFWQNLAGYKRQEALRPYLSSEEDRKKGKKFARYQLGDLLLHLEKKHGEDWGKVYDEAWERIDKKVEGLSKHIKLEEERRSEDAQSKAALTDWLRAKASFVIEGLKEADKDEFCRCELKLQKWYGDLRGKPFAIEAENSILDISGFSKQYNCAFIWQKDGVKKLNLYLIINYFKGGKLRFKKIKPEAFEANRFYTVINKKSGEIVPMEVNFNFDDPNLIILPLAFGKRQGREFIWNDLLSLETGSLKLANGRVIEKTLYNRRTRQDEPALFVALTFERREVLDSSNIKPMNLIGVDRGENIPAVIALTDPEGCPLSRFKDSLGNPTHILRIGESYKEKQRTIQAKKEVEQRRAGGYSRKYASKAKNLADDMVRNTARDLLYYAVTQDAMLIFENLSRGFGRQGKRTFMAERQYTRMEDWLTAKLAYEGLPSKTYLSKTLAQYTSKTCSNCGFTITSADYDRVLEKLKKTATGWMTTINGKELKVEGQITYYNRYKRQNVVKDLSVELDRLSEESVNNDISSWTKGRSGEALSLLKKRFSHRPVQEKFVCLNCGFETHADEQAALNIARSWLFLRSQEYKKYQTNKTTGNTDKRAFVETWQSFYRKKLKEVWKPAV

SEQ ID NO: 49080 - protein, 979 aa, synthetic construct
  REGION 1..979: note = engineered CasX variant
QEIKRINKIRRRLVKDSNTKKAGKTGPMKTLLVRVMTPDLRERLENLRKKPENIPQPISNTSRANLNKLLTDYTEMKKAILHVYWEEFQKDPVGLMSRVAQPASKKIDQNKLKPEMDEKGNLTTAGFACSQCGQPLFVYKLEQVSEKGKAYTNYFGRCNVAEHEKLILLAQLKPEKDSDEAVTYSLGKFGQRALDFYSIHVTKESTHPVKPLAQIAGNRYASGPVGKALRDACMGTIASFLSKYQDIIIEHQKVVKGNQKRLESLRELAGKENLEYPSVTLPPQPHTKEGVDAYNEVIARVRMWVNLNLWQKLKLSRDDAKPLLRLKGFPSFPLVERQQANEVDWWDMVCNVKKLINEKKEDGKVFWQNLAIYKRQEALRPYLSSEEDRKKGKKFARYQLGDLLLHLEKKHGEDWGKVYDEAWERIDKKVEGLSKHIKLEEERRSEDAQSKAALTDWLRAKASFVIEGLKEADKDEFCRCELKLQKWYGDLRGKPFAIEAENSILDISGFSKQYNCAFIWQKDGVKKLNLYLIINYFKGGKLRFKKIKPEAFEANRFYTVINKKSGEIVPMEVNFNFDDPNLIILPLAFGKRQGREFIWNDLLSLETGSLKLANGRVIEKTLYNRRTRQDEPALFVALTFERREVLDSSNIKPMNLIGVDRGENIPAVIALTDPEGCPLSRFKDSLGNPTHILRIGESYKEKQRTIQAKKEVEQRRAGGYSRKYASKAKNLADDMVRNTARDLLYYAVTQDAMLIFENLSRGFGRQGKRTFMAERQYTRMEDWLTAKLAYEGLPSKTYLSKTLAQYTSKTCSNCGFTITSADYDRVLEKLKKTATGWMTTINGKELKVEGQITYYNRYKRQNVVKDLSVELDRLSEESVNNDISSWTKGRSGEALSLLKKRFSHRPVQEKFVCLNCGFETHADEQAALNIARSWLFLRSQEYKKYQTNKTTGNTDKRAFVETWQSFYRKKLKEVWKPAV

SEQ ID NO: 49081 - protein, 979 aa, synthetic construct
  REGION 1..979: note = engineered CasX variant
QEIKRINKIRRRLVKDSNTKKAGKTGPMKTLLVRVMTPDLRERLENLRKKPENIPQPISNTSRANLNKLLTDYTEMKKAILHVYWEEFQKDPVGLMSRVAQPASKKIDQNKLKPEMDEKGNLTTAGFACSQCGQPLFVYKLEQVSEKGKAYTNYFGRCNVAEHEKLILLAQLKPEKDSDEAVTYSLGKFGQRALDFYSIHVTKESTHPVKPLAQIAGNRYASGPVGKALRDACMGTIASFLSKYQDIIIEHQKVVKGNQKRLESLRELAGKENLEYPSVTLPPQPHTKEGVDAYNEVIARVRMWVNLNLWQKLKLSRDDAKPLLRLKGFPSFPLVERQQANEVDWWDMVCNVKKLINEKKEDGKVFWQNLAGYKRQEALRPYLSSEEDREKGKKFARYQLGDLLLHLEKKHGEDWGKVYDEAWERIDKKVEGLSKHIKLEEERRSEDAQSKAALTDWLRAKASFVIEGLKEADKDEFCRCELKLQKWYGDLRGKPFAIEAENSILDISGFSKQYNCAFIWQKDGVKKLNLYLIINYFKGGKLRFKKIKPEAFEANRFYTVINKKSGEIVPMEVNFNFDDPNLIILPLAFGKRQGREFIWNDLLSLETGSLKLANGRVIEKTLYNRRTRQDEPALFVALTFERREVLDSSNIKPMNLIGVDRGENIPAVIALTDPEGCPLSRFKDSLGNPTHILRIGESYKEKQRTIQAKKEVEQRRAGGYSRKYASKAKNLADDMVRNTARDLLYYAVTQDAMLIFENLSRGFGRQGKRTFMAERQYTRMEDWLTAKLAYEGLPSKTYLSKTLAQYTSKTCSNCGFTITSADYDRVLEKLKKTATGWMTTINGKELKVEGQITYYNRYKRQNVVKDLSVELDRLSEESVNNDISSWTKGRSGEALSLLKKRFSHRPVQEKFVCLNCGFETHADEQAALNIARSWLFLRSQEYKKYQTNKTTGNTDKRAFVETWQSFYRKKLKEVWKPAV

SEQ ID NO: 49082 - protein, 979 aa, synthetic construct
  REGION 1..979: note = engineered CasX variant
QEIKRINKIRRRLVKDSNTKKAGKTGPMKTLLVRVMTPDLRERLENLRKKPENIPQPISNTSRANLNKLLTDYTEMKKAILHVYWEEFQKDPVGLMSRVAQPASKKIDQNKLKPEMDEKGNLTTAGFACSQCGQPLFVYKLEQVSEKGKAYTNYFGRCNVAEHEKLILLAQLKPEKDSDEAVTYSLGKFGQRALDFYSIHVTKESTHPVKPLAQIAGNRYASGPVGKALRDACMGTIASFLSKYQDIIIEHQKVVKGNQKRLESLRELAGKENLEYPSVTLPPQPHTKEGVDAYNEVIARVRMWVNLNLWQKLKLSRDDAKPLLRLKGFPSFPLVERQQANEVDWWDMVCNVKKLINEKKEDGKVFWQNLAGYKRQEALRPYLSSEEDRKKGKKFARYQLGDLLLHLEKKHGEDWGKVYDEAWERIDKKVEGLSKHIKLEEERRSEDAQSKAALTDWLRAKASFVIEGLKEADKDEFCRCELKLQKWYGDLRGKPFAIEAENSILDISGFSKQYNCAFIWQKDGVKKLNLYLIINYFKGGKLRFKKIKPEAFEANRFYTVINKKSGEIVIMEVNFNFDDPNLIILPLAFGKRQGREFIWNDLLSLETGSLKLANGRVIEKTLYNRRTRQDEPALFVALTFERREVLDSSNIKPMNLIGVDRGENIPAVIALTDPEGCPLSRFKDSLGNPTHILRIGESYKEKQRTIQAKKEVEQRRAGGYSRKYASKAKNLADDMVRNTARDLLYYAVTQDAMLIFENLSRGFGRQGKRTFMAERQYTRMEDWLTAKLAYEGLPSKTYLSKTLAQYTSKTCSNCGFTITSADYDRVLEKLKKTATGWMTTINGKELKVEGQITYYNRYKRQNVVKDLSVELDRLSEESVNNDISSWTKGRSGEALSLLKKRFSHRPVQEKFVCLNCGFETHADEQAALNIARSWLFLRSQEYKKYQTNKTTGNTDKRAFVETWQSFYRKKLKEVWKPAV

SEQ ID NO: 49083 - protein, 979 aa, synthetic construct
  REGION 1..979: note = engineered CasX variant
QEIKRINKIRRRLVKDSNTKKAGKTGPMKTLLVRVMTPDLRERLENLRKKPENIPQPISNTSRANLNKLLTDYTEMKKAILHVYWEEFQKDPVGLMSRVAQPASKKIDQNKLKPEMDEKGNLTTAGFACSQCGQPLFVYKLEQVSEKGKAYTNYFGRCNVAEHEKLILLAQLKPEKDSDEAVTYSLGKFGQRALDFYSIHVTKESTHPVKPLAQIAGNRYASGPVGKALRGACMGTIASFLSKYQDIIIEHQKVVKGNQKRLESLRELAGKENLEYPSVTLPPQPHTKEGVDAYNEVIARVRMWVNLNLWQKLKLSRDDAKPLLRLKGFPSFPLVERQANAEVDWWDMVCNVKKLINEKKEDGKVFWQNLAGYKRQEALRPYLSSEEDRKKGKKFARYQLGDLLLHLEKKHGEDWGKVYDEAWERIDKKVEGLSKHIKLEEERRSEDAQSKAALTDWLRAKASFVIEGLKEADKDEFCRCELKLQKWYGDLRGKPFAIEAENSILDISGFSKQYNCAFIWQKDGVKKLNLYLIINYFKGGKLRFKKIKPEAFEANRFYTVINKKSGEIVPMEVNFNFDDPNLIILPLAFGKRQGREFIWNDLLSLETGSLKLANGRVIEKTLYNRRTRQDEPALFVALTFERREVLDSSNIKPMNLIGVDRGENIPAVIALTDPEGCPLSRFKDSLGNPTHILRIGESYKEKQRTIQAKKEVEQRRAGGYSRKYASKAKNLADDMVRNTARDLLYYAVTQDAMLIFENLSRGFGRQGKRTFMAERQYTRMEDWLTAKLAYEGLPSKTYLSKTLAQYTSKTCSNCGFTITSADYDRVLEKLKKTATGWMTTINGKELKVEGQITYYNRYKRQNVVKDLSVELDRLSEESVNNDISSWTKGRSGEALSLLKKRFSHRPVQEKFVCLNCGFETHADEQAALNIARSWLFLRSQEYKKYQTNKTTGNTDKRAFVETWQSFYRKKLKEVWKPAV

SEQ ID NO: 49084 - protein, 979 aa, synthetic construct
  REGION 1..979: note = engineered CasX variant
QEIKRINKIRRRLVKDSNTKKAGKTGPMKTLLVRVMTPDLRERLENLRKKPENIPQPISNTSRANLNKLLTDYTEMKKAILHVYWEEFQKDPVGLMSRVAQPASKKIDQNKLKPEMDEKGNLTTAGFACSQCGQPLFVYKLEQVSEKGKAYTNYFGRCNVAEHEKLILLAQLKPEKDSDEAVTYSLGKFGQRALDFYSIHVTKESTHPVKPLAQIAGNRYASGPVGKALRDACMGTIASFLSKYQDIIIEHQKVVKGNQKRLESLRELAGKENLEYPSVTLPPQPHTKEGVDAYNEVIARVRMWVNLNLWQKLKLSRDDAKPLLRLKNFPSFPLVERQANAEVDWWDMVCNVKKLINEKKEDGKVFWQNLAGYKRQEALRPYLSSEEDRKKGKKFARYQLGDLLLHLEKKHGEDWGKVYDEAWERIDKKVEGLSKHIKLEEERRSEDAQSKAALTDWLRAKASFVIEGLKEADKDEFCRCELKLQKWYGDLRGKPFAIEAENSILDISGFSKQYNCAFIWQKDGVKKLNLYLIINYFKGGKLRFKKIKPEAFEANRFYTVINKKSGEIVPMEVNFNFDDPNLIILPLAFGKRQGREFIWNDLLSLETGSLKLANGRVIEKTLYNRRTRQDEPALFVALTFERREVLDSSNIKPMNLIGVDRGENIPAVIALTDPEGCPLSRFKDSLGNPTHILRIGESYKEKQRTIQAKKEVEQRRAGGYSRKYASKAKNLADDMVRNTARDLLYYAVTQDAMLIFENLSRGFGRQGKRTFMAERQYTRMEDWLTAKLAYEGLPSKTYLSKTLAQYTSKTCSNCGFTITSADYDRVLEKLKKTATGWMTTINGKELKVEGQITYYNRYKRQNVVKDLSVELDRLSEESVNNDISSWTKGRSGEALSLLKKRFSHRPVQEKFVCLNCGFETHADEQAALNIARSWLFLRSQEYKKYQTNKTTGNTDKRAFVETWQSFYRKKLKEVWKPAV

SEQ ID NO: 49085 - protein, 979 aa, synthetic construct
  REGION 1..979: note = engineered CasX variant
QEIKRINKIRRRLVKDSNTKKAGKTGPMKTLLVRVMTPDLRERLENLRKKPENIPQPISNTSRANLNKLLTDYTEMKKAILHVYWEEFQKDPVGLMSRVAQPASKKIDQNKLKPEMDEKGNLTTAGFACSQCGQPLFVYKLEQVSEKGKAYTNYFGRCNVAEHEKLILLAQLKPEKDSDEAVTYSLGKFGQRALDFYSIHVTKESTHPVKPLAQIAGNRYASGPVGKALRDACMGTIASFLSKYQDIIIEHQKVVKGNQKRLESLRELAGKENLEYPSVTLPPQPHTKEGVDAYNEVIARVRMWVNLNLWQKLKLSRDDAKPLLRLKGFPSFPLVERQANAEVDWWDMVCNVKKLINEKKEDGKVFWQNLAGYKRQEALRPYLSSEEDRKKGKKFARYQLGDLLNHLEKKHGEDWGKVYDEAWERIDKKVEGLSKHIKLEEERRSEDAQSKAALTDWLRAKASFVIEGLKEADKDEFCRCELKLQKWYGDLRGKPFAIEAENSILDISGFSKQYNCAFIWQKDGVKKLNLYLIINYFKGGKLRFKKIKPEAFEANRFYTVINKKSGEIVPMEVNFNFDDPNLIILPLAFGKRQGREFIWNDLLSLETGSLKLANGRVIEKTLYNRRTRQDEPALFVALTFERREVLDSSNIKPMNLIGVDRGENIPAVIALTDPEGCPLSRFKDSLGNPTHILRIGESYKEKQRTIQAKKEVEQRRAGGYSRKYASKAKNLADDMVRNTARDLLYYAVTQDAMLIFENLSRGFGRQGKRTFMAERQYTRMEDWLTAKLAYEGLPSKTYLSKTLAQYTSKTCSNCGFTITSADYDRVLEKLKKTATGWMTTINGKELKVEGQITYYNRYKRQNVVKDLSVELDRLSEESVNNDISSWTKGRSGEALSLLKKRFSHRPVQEKFVCLNCGFETHADEQAALNIARSWLFLRSQEYKKYQTNKTTGNTDKRAFVETWQSFYRKKLKEVWKPAV

SEQ ID NO: 49086 - protein, 979 aa, synthetic construct
  REGION 1..979: note = engineered CasX variant
QEIKRINKIRRRLVKDSNTKKAGKTGPMKTLLVRVMTPDLRERLENLRKKPENIPQPISNTSRANLNKLLTDYTEMKKAILHVYWEEFQKDPVGLMSRVAQPASKKIDQNKLKPEMDEKGNLTTAGFACSQCGQPLFVYKLEQVSEKGKAYTNYFGRCNVAEHEKLILLAQLKPEKDSDEAVTYSLGKFGQRALDFYSIHVTKESTHPVKPLAQIAGNRYASGPVGKALRDACMGTIASFLSKYQDIIIEHQKVVKGNQKRLESLRELAGKENLEYPSVTLPPQPHTKEGVDAYNEVIARVRMWVNLNLWQKLKLSRDDAKPLLRLKGFPSFPLVERQANAEVDWWDMVCNVKKLINEKKEDGKVFWQNLAGYKRQEALRPYLSSEEDRKKGKKFARYQLGDLLWHLEKKHGEDWGKVYDEAWERIDKKVEGLSKHIKLEEERRSEDAQSKAALTDWLRAKASFVIEGLKEADKDEFCRCELKLQKWYGDLRGKPFAIEAENSILDISGFSKQYNCAFIWQKDGVKKLNLYLIINYFKGGKLRFKKIKPEAFEANRFYTVINKKSGEIVPMEVNFNFDDPNLIILPLAFGKRQGREFIWNDLLSLETGSLKLANGRVIEKTLYNRRTRQDEPALFVALTFERREVLDSSNIKPMNLIGVDRGENIPAVIALTDPEGCPLSRFKDSLGNPTHILRIGESYKEKQRTIQAKKEVEQRRAGGYSRKYASKAKNLADDMVRNTARDLLYYAVTQDAMLIFENLSRGFGRQGKRTFMAERQYTRMEDWLTAKLAYEGLPSKTYLSKTLAQYTSKTCSNCGFTITSADYDRVLEKLKKTATGWMTTINGKELKVEGQITYYNRYKRQNVVKDLSVELDRLSEESVNNDISSWTKGRSGEALSLLKKRFSHRPVQEKFVCLNCGFETHADEQAALNIARSWLFLRSQEYKKYQTNKTTGNTDKRAFVETWQSFYRKKLKEVWKPAV

SEQ ID NO: 49087 - protein, 979 aa, synthetic construct
  REGION 1..979: note = engineered CasX variant
QEIKRINKIRRRLVKDSNTKKAGKTGPMKTLLVRVMTPDLRERLENLRKKPENIPQPISNTSRANLNKLLTDYTEMKKAILHVYWEEFQKDPVGLMSRVAQPASKKIDQNKLKPEMDEKGNLTTAGFACSQCGQPLFVYKLEQVSEKGKAYTNYFGRCNVAEHEKLILLAQLKPEKDSDEAVTYSLGKFGQRALDFYSIHVTKESTHPVKPLAQIAGNRYASGPVGKALRDACMGTIASFLSKYQDIIIEHQKVVKGNQKRLESLRELAGKENLEYPSVTLPPQPHTKEGVDAYNEVIARVRMWVNLNLWQKLKLSRDDAKPLLRLKGFPSFPLVERQANAEVDWWDMVCNVKKLINEKKEDGKVFWQNLAGYKRQEALRPYLSSEEDRKKGKKFARYQLGDLLLHLYKKHGEDWGKVYDEAWERIDKKVEGLSKHIKLEEERRSEDAQSKAALTDWLRAKASFVIEGLKEADKDEFCRCELKLQKWYGDLRGKPFAIEAENSILDISGFSKQYNCAFIWQKDGVKKLNLYLIINYFKGGKLRFKKIKPEAFEANRFYTVINKKSGEIVPMEVNFNFDDPNLIILPLAFGKRQGREFIWNDLLSLETGSLKLANGRVIEKTLYNRRTRQDEPALFVALTFERREVLDSSNIKPMNLIGVDRGENIPAVIALTDPEGCPLSRFKDSLGNPTHILRIGESYKEKQRTIQAKKEVEQRRAGGYSRKYASKAKNLADDMVRNTARDLLYYAVTQDAMLIFENLSRGFGRQGKRTFMAERQYTRMEDWLTAKLAYEGLPSKTYLSKTLAQYTSKTCSNCGFTITSADYDRVLEKLKKTATGWMTTINGKELKVEGQITYYNRYKRQNVVKDLSVELDRLSEESVNNDISSWTKGRSGEALSLLKKRFSHRPVQEKFVCLNCGFETHADEQAALNIARSWLFLRSQEYKKYQTNKTTGNTDKRAFVETWQSFYRKKLKEVWKPAV

SEQ ID NO: 49088 - protein, 979 aa, synthetic construct
  REGION 1..979: note = engineered CasX variant
QEIKRINKIRRRLVKDSNTKKAGKTGPMKTLLVRVMTPDLRERLENLRKKPENIPQPISNTSRANLNKLLTDYTEMKKAILHVYWEEFQKDPVGLMSRVAQPASKKIDQNKLKPEMDEKGNLTTAGFACSQCGQPLFVYKLEQVSEKGKAYTNYFGRCNVAEHEKLILLAQLKPEKDSDEAVTYSLGKFGQRALDFYSIHVTKESTHPVKPLAQIAGNRYASGPVGKALRDACMGTIASFLSKYQDIIIEHQKVVKGNQKRLESLRELAGKENLEYPSVTLPPQPHTKEGVDAYNEVIARVRMWVNLNLWQKLKLSRDDAKPLLRLKGFPSFPLVERQANAEVDWWDMVCNVKKLINEKKEDGKVFWQNLAGYKRQEALRPYLSSEEDRKKGKKFARYQLGDLLLHLEKKHPEDWGKVYDEAWERIDKKVEGLSKHIKLEEERRSEDAQSKAALTDWLRAKASFVIEGLKEADKDEFCRCELKLQKWYGDLRGKPFAIEAENSILDISGFSKQYNCAFIWQKDGVKKLNLYLIINYFKGGKLRFKKIKPEAFEANRFYTVINKKSGEIVPMEVNFNFDDPNLIILPLAFGKRQGREFIWNDLLSLETGSLKLANGRVIEKTLYNRRTRQDEPALFVALTFERREVLDSSNIKPMNLIGVDRGENIPAVIALTDPEGCPLSRFKDSLGNPTHILRIGESYKEKQRTIQAKKEVEQRRAGGYSRKYASKAKNLADDMVRNTARDLLYYAVTQDAMLIFENLSRGFGRQGKRTFMAERQYTRMEDWLTAKLAYEGLPSKTYLSKTLAQYTSKTCSNCGFTITSADYDRVLEKLKKTATGWMTTINGKELKVEGQITYYNRYKRQNVVKDLSVELDRLSEESVNNDISSWTKGRSGEALSLLKKRFSHRPVQEKFVCLNCGFETHADEQAALNIARSWLFLRSQEYKKYQTNKTTGNTDKRAFVETWQSFYRKKLKEVWKPAV

SEQ ID NO: 49089 - protein, 980 aa, synthetic construct
  REGION 1..980: note = engineered CasX variant
QEIKRINKIRRRLVKDSNTKKAGKTGPMKTLLVRVMTPDLRERLENLRKKPENIPQPISNTSRANLNKLLTDYTEMKKAILHVYWEEFQKDPVGLMSRVAQPASKKIDQNKLKPEMDEKGNLTTAGFACSQCGQPLFVYKLEQVSEKGKAYTNYFGRCNVAEHEKLILLAQLKPEKDSDEAVTYSLGKFGQRALDFYSIHVTKESTHPVKPLAQIAGNRYASGPVGKALRDACMGTIASFLSKYQDIIIEHQKVVKGNQKRLESLRELAGKENLEYPSVTLPPQPHTKEGVDAYNEVIARVRMWVNLNLWQKLKLSRDDAKPLLRLKGFPSFPLVERQANAEVDWWDMVCNVKKLINEKKEDGKVFWQNLAGYKRQEALRPYLSSEEDRKKGKKFARYQLGDLLLHLEKKHGERDWGKVYDEAWERIDKKVEGLSKHIKLEEERRSEDAQSKAALTDWLRAKASFVIEGLKEADKDEFCRCELKLQKWYGDLRGKPFAIEAENSILDISGFSKQYNCAFIWQKDGVKKLNLYLIINYFKGGKLRFKKIKPEAFEANRFYTVINKKSGEIVPMEVNFNFDDPNLIILPLAFGKRQGREFIWNDLLSLETGSLKLANGRVIEKTLYNRRTRQDEPALFVALTFERREVLDSSNIKPMNLIGVDRGENIPAVIALTDPEGCPLSRFKDSLGNPTHILRIGESYKEKQRTIQAKKEVEQRRAGGYSRKYASKAKNLADDMVRNTARDLLYYAVTQDAMLIFENLSRGFGRQGKRTFMAERQYTRMEDWLTAKLAYEGLPSKTYLSKTLAQYTSKTCSNCGFTITSADYDRVLEKLKKTATGWMTTINGKELKVEGQITYYNRYKRQNVVKDLSVELDRLSEESVNNDISSWTKGRSGEALSLLKKRFSHRPVQEKFVCLNCGFETHADEQAALNIARSWLFLRSQEYKKYQTNKTTGNTDKRAFVETWQSFYRKKLKEVWKPAV

SEQ ID NO: 49090 - protein, 980 aa, synthetic construct
  REGION 1..980: note = engineered CasX variant
QEIKRINKIRRRLVKDSNTKKAGKTGPMKTLLVRVMTPDLRERLENLRKKPENIPQPISNTSRANLNKLLTDYTEMKKAILHVYWEEFQKDPVGLMSRVAQPASKKIDQNKLKPEMDEKGNLTTAGFACSQCGQPLFVYKLEQVSEKGKAYTNYFGRCNVAEHEKLILLAQLKPEKDSDEAVTYSLGKFGQRALDFYSIHVTKESTHPVKPLAQIAGNRYASGPVGKALRDACMGTIASFLSKYQDIIIEHQKVVKGNQKRLESLRELAGKENLEYPSVTLPPQPHTKEGVDAYNEVIARVRMWVNLNLWQKLKLSRDDAKPLLRLKGFPSFPLVERQANAEVDWWDMVCNVKKLINEKKEDGKVFWQNLAGYKRQEALRPYLSSEEDRKKGKKFARYQLGDLLLHLEKKHGEYDWGKVYDEAWERIDKKVEGLSKHIKLEEERRSEDAQSKAALTDWLRAKASFVIEGLKEADKDEFCRCELKLQKWYGDLRGKPFAIEAENSILDISGFSKQYNCAFIWQKDGVKKLNLYLIINYFKGGKLRFKKIKPEAFEANRFYTVINKKSGEIVPMEVNFNFDDPNLIILPLAFGKRQGREFIWNDLLSLETGSLKLANGRVIEKTLYNRRTRQDEPALFVALTFERREVLDSSNIKPMNLIGVDRGENIPAVIALTDPEGCPLSRFKDSLGNPTHILRIGESYKEKQRTIQAKKEVEQRRAGGYSRKYASKAKNLADDMVRNTARDLLYYAVTQDAMLIFENLSRGFGRQGKRTFMAERQYTRMEDWLTAKLAYEGLPSKTYLSKTLAQYTSKTCSNCGFTITSADYDRVLEKLKKTATGWMTTINGKELKVEGQITYYNRYKRQNVVKDLSVELDRLSEESVNNDISSWTKGRSGEALSLLKKRFSHRPVQEKFVCLNCGFETHADEQAALNIARSWLFLRSQEYKKYQTNKTTGNTDKRAFVETWQSFYRKKLKEVWKPAV

SEQ ID NO: 49091 - protein, 979 aa, synthetic construct
  REGION 1..979: note = engineered CasX variant
QEIKRINKIRRRLVKDSNTKKAGKTGPMKTLLVRVMTPDLRERLENLRKKPENIPQPISNTSRANLNKLLTDYTEMKKAILHVYWEEFQKDPVGLMSRVAQPASKKIDQNKLKPEMDEKGNLTTAGFACSQCGQPLFVYKLEQVSEKGKAYTNYFGRCNVAEHEKLILLAQLKPEKDSDEAVTYSLGKFGQRALDFYSIHVTKESTHPVKPLAQIAGNRYASGPVGKALRDACMGTIASFLSKYQDIIIEHQKVVKGNQKRLESLRELAGKENLEYPSVTLPPQPHTKEGVDAYNEVIARVRMWVNLNLWQKLKLSRDDAKPLLRLKGFPSFPLVERQANAEVDWWDMVCNVKKLINEKKEDGKVFWQNLAGYKRQEALRPYLSSEEDRKKGKKFARYQLGDLLLHLEKKHGEDWGDVYDEAWERIDKKVEGLSKHIKLEEERRSEDAQSKAALTDWLRAKASFVIEGLKEADKDEFCRCELKLQKWYGDLRGKPFAIEAENSILDISGFSKQYNCAFIWQKDGVKKLNLYLIINYFKGGKLRFKKIKPEAFEANRFYTVINKKSGEIVPMEVNFNFDDPNLIILPLAFGKRQGREFIWNDLLSLETGSLKLANGRVIEKTLYNRRTRQDEPALFVALTFERREVLDSSNIKPMNLIGVDRGENIPAVIALTDPEGCPLSRFKDSLGNPTHILRIGESYKEKQRTIQAKKEVEQRRAGGYSRKYASKAKNLADDMVRNTARDLLYYAVTQDAMLIFENLSRGFGRQGKRTFMAERQYTRMEDWLTAKLAYEGLPSKTYLSKTLAQYTSKTCSNCGFTITSADYDRVLEKLKKTATGWMTTINGKELKVEGQITYYNRYKRQNVVKDLSVELDRLSEESVNNDISSWTKGRSGEALSLLKKRFSHRPVQEKFVCLNCGFETHADEQAALNIARSWLFLRSQEYKKYQTNKTTGNTDKRAFVETWQSFYRKKLKEVWKPAV

SEQ ID NO: 49092 - protein, 979 aa, synthetic construct
  REGION 1..979: note = engineered CasX variant
QEIKRINKIRRRLVKDSNTKKAGKTGPMKTLLVRVMTPDLRERLENLRKKPENIPQPISNTSRANLNKLLTDYTEMKKAILHVYWEEFQKDPVGLMSRVAQPASKKIDQNKLKPEMDEKGNLTTAGFACSQCGQPLFVYKLEQVSEKGKAYTNYFGRCNVAEHEKLILLAQLKPEKDSDEAVTYSLGKFGQRALDFYSIHVTKESTHPVKPLAQIAGNRYASGPVGKALRDACMGTIASFLSKYQDIIIEHQKVVKGNQKRLESLRELAGKENLEYPSVTLPPQPHTKEGVDAYNEVIARVRMWVNLNLWQKLKLSRDDAKPLLRLKGFPSFPLVERQANAEVDWWDMVCNVKKLINEKKEDGKVFWQNLAGYKRQEALRPYLSSEEDRKKGKKFARYQLGDLLLHLEKKHGEDWGKVYGEAWERIDKKVEGLSKHIKLEEERRSEDAQSKAALTDWLRAKASFVIEGLKEADKDEFCRCELKLQKWYGDLRGKPFAIEAENSILDISGFSKQYNCAFIWQKDGVKKLNLYLIINYFKGGKLRFKKIKPEAFEANRFYTVINKKSGEIVPMEVNFNFDDPNLIILPLAFGKRQGREFIWNDLLSLETGSLKLANGRVIEKTLYNRRTRQDEPALFVALTFERREVLDSSNIKPMNLIGVDRGENIPAVIALTDPEGCPLSRFKDSLGNPTHILRIGESYKEKQRTIQAKKEVEQRRAGGYSRKYASKAKNLADDMVRNTARDLLYYAVTQDAMLIFENLSRGFGRQGKRTFMAERQYTRMEDWLTAKLAYEGLPSKTYLSKTLAQYTSKTCSNCGFTITSADYDRVLEKLKKTATGWMTTINGKELKVEGQITYYNRYKRQNVVKDLSVELDRLSEESVNNDISSWTKGRSGEALSLLKKRFSHRPVQEKFVCLNCGFETHADEQAALNIARSWLFLRSQEYKKYQTNKTTGNTDKRAFVETWQSFYRKKLKEVWKPAV

SEQ ID NO: 49093 - protein, 979 aa, synthetic construct
  REGION 1..979: note = engineered CasX variant
QEIKRINKIRRRLVKDSNTKKAGKTGPMKTLLVRVMTPDLRERLENLRKKPENIPQPISNTSRANLNKLLTDYTEMKKAILHVYWEEFQKDPVGLMSRVAQPASKKIDQNKLKPEMDEKGNLTTAGFACSQCGQPLFVYKLEQVSEKGKAYTNYFGRCNVAEHEKLILLAQLKPEKDSDEAVTYSLGKFGQRALDFYSIHVTKESTHPVKPLAQIAGNRYASGPVGKALRDACMGTIASFLSKYQDIIIEHQKVVKGNQKRLESLRELAGKENLEYPSVTLPPQPHTKEGVDAYNEVIARVRMWVNLNLWQKLKLSRDDAKPLLRLKGFPSFPLVERQANAEVDWWDMVCNVKKLINEKKEDGKVFWQNLAGYKRQEALRPYLSSEEDRKKGKKFARYQLGDLLLHLEKKHGEDWGKVYDEAWERIDKKVEGLSKHIKLEEERRSEDAQSKAALTDWLRAKASFVIEGKKEADKDEFCRCELKLQKWYGDLRGKPFAIEAENSILDISGFSKQYNCAFIWQKDGVKKLNLYLIINYFKGGKLRFKKIKPEAFEANRFYTVINKKSGEIVPMEVNFNFDDPNLIILPLAFGKRQGREFIWNDLLSLETGSLKLANGRVIEKTLYNRRTRQDEPALFVALTFERREVLDSSNIKPMNLIGVDRGENIPAVIALTDPEGCPLSRFKDSLGNPTHILRIGESYKEKQRTIQAKKEVEQRRAGGYSRKYASKAKNLADDMVRNTARDLLYYAVTQDAMLIFENLSRGFGRQGKRTFMAERQYTRMEDWLTAKLAYEGLPSKTYLSKTLAQYTSKTCSNCGFTITSADYDRVLEKLKKTATGWMTTINGKELKVEGQITYYNRYKRQNVVKDLSVELDRLSEESVNNDISSWTKGRSGEALSLLKKRFSHRPVQEKFVCLNCGFETHADEQAALNIARSWLFLRSQEYKKYQTNKTTGNTDKRAFVETWQSFYRKKLKEVWKPAV

SEQ ID NO: 49094 - protein, 979 aa, synthetic construct
  REGION 1..979: note = engineered CasX variant
QEIKRINKIRRRLVKDSNTKKAGKTGPMKTLLVRVMTPDLRERLENLRKKPENIPQPISNTSRANLNKLLTDYTEMKKAILHVYWEEFQKDPVGLMSRVAQPASKKIDQNKLKPEMDEKGNLTTAGFACSQCGQPLFVYKLEQVSEKGKAYTNYFGRCNVAEHEKLILLAQLKPEKDSDEAVTYSLGKFGQRALDFYSIHVTKESTHPVKPLAQIAGNRYASGPVGKALRDACMGTIASFLSKYQDIIIEHQKVVKGNQKRLESLRELAGKENLEYPSVTLPPQPHTKEGVDAYNEVIARVRMWVNLNLWQKLKLSRDDAKPLLRLKGFPSFPLVERQANAEVDWWDMVCNVKKLINEKKEDGKVFWQNLAGYKRQEALRPYLSSEEDRKKGKKFARYQLGDLLLHLEKKHGEDWGKVYDEAWERIDKKVEGLSKHIKLEEERRSEDAQSKAALTDWLRAKASFVIEGSKEADKDEFCRCELKLQKWYGDLRGKPFAIEAENSILDISGFSKQYNCAFIWQKDGVKKLNLYLIINYFKGGKLRFKKIKPEAFEANRFYTVINKKSGEIVPMEVNFNFDDPNLIILPLAFGKRQGREFIWNDLLSLETGSLKLANGRVIEKTLYNRRTRQDEPALFVALTFERREVLDSSNIKPMNLIGVDRGENIPAVIALTDPEGCPLSRFKDSLGNPTHILRIGESYKEKQRTIQAKKEVEQRRAGGYSRKYASKAKNLADDMVRNTARDLLYYAVTQDAMLIFENLSRGFGRQGKRTFMAERQYTRMEDWLTAKLAYEGLPSKTYLSKTLAQYTSKTCSNCGFTITSADYDRVLEKLKKTATGWMTTINGKELKVEGQITYYNRYKRQNVVKDLSVELDRLSEESVNNDISSWTKGRSGEALSLLKKRFSHRPVQEKFVCLNCGFETHADEQAALNIARSWLFLRSQEYKKYQTNKTTGNTDKRAFVETWQSFYRKKLKEVWKPAV

SEQ ID NO: 49095 - protein, 980 aa, synthetic construct
  REGION 1..980: note = engineered CasX variant
QEIKRINKIRRRLVKDSNTKKAGKTGPMKTLLVRVMTPDLRERLENLRKKPENIPQPISNTSRANLNKLLTDYTEMKKAILHVYWEEFQKDPVGLMSRVAQPASKKIDQNKLKPEMDEKGNLTTAGFACSQCGQPLFVYKLEQVSEKGKAYTNYFGRCNVAEHEKLILLAQLKPEKDSDEAVTYSLGKFGQRALDFYSIHVTKESTHPVKPLAQIAGNRYASGPVGKALRDACMGTIASFLSKYQDIIIEHQKVVKGNQKRLESLRELAGKENLEYPSVTLPPQPHTKEGVDAYNEVIARVRMWVNLNLWQKLKLSRDDAKPLLRLKGFPSFPLVERQANAEVDWWDMVCNVKKLINEKKEDGKVFWQNLAGYKRQEALRPYLSSEEDRKKGKKFARYQLGDLLLHLEKKHGEDWGKVYDEAWERIDKKVEGLSKHIKLEEERRSEDAQSKAALTDWLRAKASFVIEGLKEADDKDEFCRCELKLQKWYGDLRGKPFAIEAENSILDISGFSKQYNCAFIWQKDGVKKLNLYLIINYFKGGKLRFKKIKPEAFEANRFYTVINKKSGEIVPMEVNFNFDDPNLIILPLAFGKRQGREFIWNDLLSLETGSLKLANGRVIEKTLYNRRTRQDEPALFVALTFERREVLDSSNIKPMNLIGVDRGENIPAVIALTDPEGCPLSRFKDSLGNPTHILRIGESYKEKQRTIQAKKEVEQRRAGGYSRKYASKAKNLADDMVRNTARDLLYYAVTQDAMLIFENLSRGFGRQGKRTFMAERQYTRMEDWLTAKLAYEGLPSKTYLSKTLAQYTSKTCSNCGFTITSADYDRVLEKLKKTATGWMTTINGKELKVEGQITYYNRYKRQNVVKDLSVELDRLSEESVNNDISSWTKGRSGEALSLLKKRFSHRPVQEKFVCLNCGFETHADEQAALNIARSWLFLRSQEYKKYQTNKTTGNTDKRAFVETWQSFYRKKLKEVWKPAV

SEQ ID NO: 49096 - protein, 980 aa, synthetic construct
  REGION 1..980: note = engineered CasX variant
QEIKRINKIRRRLVKDSNTKKAGKTGPMKTLLVRVMTPDLRERLENLRKKPENIPQPISNTSRANLNKLLTDYTEMKKAILHVYWEEFQKDPVGLMSRVAQPASKKIDQNKLKPEMDEKGNLTTAGFACSQCGQPLFVYKLEQVSEKGKAYTNYFGRCNVAEHEKLILLAQLKPEKDSDEAVTYSLGKFGQRALDFYSIHVTKESTHPVKPLAQIAGNRYASGPVGKALRDACMGTIASFLSKYQDIIIEHQKVVKGNQKRLESLRELAGKENLEYPSVTLPPQPHTKEGVDAYNEVIARVRMWVNLNLWQKLKLSRDDAKPLLRLKGFPSFPLVERQANAEVDWWDMVCNVKKLINEKKEDGKVFWQNLAGYKRQEALRPYLSSEEDRKKGKKFARYQLGDLLLHLEKKHGEDWGKVYDEAWERIDKKVEGLSKHIKLEEERRSEDAQSKAALTDWLRAKASFVIEGLKEADKDEFCRCELKLQKWYGDLRGKPFAIEAENSILDISGFSKQYNCAFIWQKDGVKKLNLYLIINYFKGGKLRFKKIKPEAFEANRFYTVINKKSGEIVPMEVNFNFDDPNLIILPLAFGKRQGREFIWNDLLSLETGSLKLANGRVIEKTLYNRRTRQDEPALFVALTFERREVLDSSNIKPMNLIGVDRGENIPAVIALTDPEGCPLSRFKDSLGNPTHILRIGESYKEKQRTIQAKKEVEQRRAGGYSRKYASKAKNLADDMVRNTARDLLYYAVTQDAMLIFENLSRGFGRQGKRTFMAERQYTRMEDWLTAKLAYEGLPSKTYLSKTLAQYTSKTCSNCGFTITSADYDRVLEKLKKTATGWMTTINGKELKVEGQITYYNRYKRQNVVKDLSVELDRLSEESVNNDISSWTKGRSGNEALSLLKKRFSHRPVQEKFVCLNCGFETHADEQAALNIARSWLFLRSQEYKKYQTNKTTGNTDKRAFVETWQSFYRKKLKEVWKPAV

SEQ ID NO: 49097 - protein, 979 aa, synthetic construct
  REGION 1..979: note = engineered CasX variant
QEIKRINKIRRRLVKDSNTKKAGKTGPMKTLLVRVMTPDLRERLENLRKKPENIPQPISNTSRANLNKLLTDYTEMKKAILHVYWEEFQKDPVGLMSRVAQPASKKIDQNKLKPEMDEKGNLTTAGFACSQCGQPLFVYKLEQVSEKGKAYTNYFGRCNVAEHEKLILLAQLKPEKDSDEAVTYSLGKFGQRALDFYSIHVTKESTHPVKPLAQIAGNRYASGPVGKALRDACMGTIASFLSKYQDIIIEHQKVVKGNQKRLESLRELAGKENLEYPSVTLPPQPHTKEGVDAYNEVIARVRMWVNLNLWQKLKLSRDDAKPLLRLKGFPSFPLVERQANAEVDWWDMVCNVKKLINEKKEDGKVFWQNLAGYKRQEALRPYLSSEEDRQKGKKFARYQLGDLLLHLEKKHGEDWGKVYDEAWERIDKKVEGLSKHIKLEEERRSEDAQSKAALTDWLRAKASFVIEGLKEADKDEFCRCELKLQKWYGDLRGKPFAIEAENSILDISGFSKQYNCAFIWQKDGVKKLNLYLIINYFKGGKLRFKKIKPEAFEANRFYTVINKKSGEIVPMEVNFNFDDPNLIILPLAFGKRQGREFIWNDLLSLETGSLKLANGRVIEKTLYNRRTRQDEPALFVALTFERREVLDSSNIKPMNLIGVDRGENIPAVIALTDPEGCPLSRFKDSLGNPTHILRIGESYKEKQRTIQAKKEVEQRRAGGYSRKYASKAKNLADDMVRNTARDLLYYAVTQDAMLIFENLSRGFGRQGKRTFMAERQYTRMEDWLTAKLAYEGLPSKTYLSKTLAQYTSKTCSNCGFTITSADYDRVLEKLKKTATGWMTTINGKELKVEGQITYYNRYKRQNVVKDLSVELDRLSEESVNNDISSWTKGRSGEALSLLKKRFSHRPVQEKFVCLNCGFETHADEQAALNIARSWLFLRSQEYKKYQTNKTTGNTDKRAFVETWQSFYRKKLKEVWKPAV

SEQ ID NO: 49098 - protein, 979 aa, synthetic construct
  REGION 1..979: note = engineered CasX variant
QEIKRINKIRRRLVKDSNTKKAGKTGPMKTLLVRVMTPDLRERLENLRKKPENIPQPISNTSRANLNKLLTDYTEMKKAILHVYWEEFQKDPVGLMSRVAQPASKKIDQNKLKPEMDEKGNLTTAGFACSQCGQPLFVYKLEQVSEKGKAYTNYFGRCNVAEHEKLILLAQLKPEKDSDEAVTYSLGKFGQRALDFYSIHVTKESTHPVKPLAQIAGNRYASGPVGKALRDACMGTIASFLSKYQDIIIEHQKVVKGNQKRLESLRELAGKENLEYPSVTLPPQPHTKEGVDAYNEVIARVRMWVNLNLWQKLKLSRDDAKPLLRLKGFPSFPLVERQANAEVDWWDMVCNVKKLINEKKEDGKVFWQNLAGYKRQEALRPYLSSEEDRKKGKKFARYQLGDLLLHLEKKHGEDWGKVYDEAWERIDKKVEGLSKHIKLEEERRSEDAQSKAALTDWLRAKASFVIEGLKEADKDEFCRCELKLQKWYGDLRGKPFAIEAENSILDISGFSKQYNCAFIWQKDGVKKLNLYLIINYFKGGKLRFKKIKPEAFEANRFYTVINKKSGEIVPMEVNFNFDDPNLIILPLAFGKRQGREFIWNDLLSLETGSLKLANGRVIEKTLYNRRTRQDEPALFVALTFERREVLDSSNIKPMNLIGVDRGENIPAVIALTDPEGCPLSRFKDSLGNPTHILRIGESYKEKQRTIQAKKEVEQRRAGGYSRKYASKAKNLADDMVRNTARDLLYYAVTQDAMLIFENLSRGFGRQGKRTFMAERQYTRMEDWLTAKLAYEGLPSQTYLSKTLAQYTSKTCSNCGFTITSADYDRVLEKLKKTATGWMTTINGKELKVEGQITYYNRYKRQNVVKDLSVELDRLSEESVNNDISSWTKGRSGEALSLLKKRFSHRPVQEKFVCLNCGFETHADEQAALNIARSWLFLRSQEYKKYQTNKTTGNTDKRAFVETWQSFYRKKLKEVWKPAV

SEQ ID NO: 49099 - protein, 979 aa, synthetic construct
  REGION 1..979: note = engineered CasX variant
QEIKRINKIRRRLVKDSNTKKAGKTGPMKTLLVRVMTPDLRERLENLRKKPENIPQPISNTSRANLNKLLTDYTEMKKAILHVYWEEFQKDPVGLMSRVAQPASKKIDQNKLKPEMDEKGNLTTAGFACSQCGQPLFVYKLEQVSEKGKAYTNYFGRCNVAEHEKLILLAQLKPEKDSDEAVTYSLGKFGQRALDFYSIHVTKESTHPVKPLAQIAGNRYASGPVGKALRDACMGTIASFLSKYQDIIIEHQKVVKGNQKRLESLRELAGKENLEYPSVTLPPQPHTKEGVDAYNEVIARVRMWVNLNLWQKLKLSRDDAKPLLRLKGFPSFPLVERQANAEVDWWDMVCNVKKLINEKKEDGKVFWQNLAGYKRQEALRPYLSSEEDRKKGKKFARYQLGDLLLHLEKKHGEDWGKVYDEAWERIDKKVEGLSKHIKLEEERRSEDAQSKAALTDWLRAKASFVIEGLKEADKDEFCRCELKLQKWYGDLRGKPFAIEAENSILDISGFSKQYNCAFIWQKDGVKKLNLYLIINYFKGGKLRFKKIKPEAFEANRFYTVINKKSGEIVPMEVNFNFDDPNLIILPLAFGKRQGREFIWNDLLSLETGSLKLANGRVIEKTLYNRRTRQDEPALFVALTFERREVLDSSNIKPMNLIGVDRGENIPAVIALTDPEGCPLSRFKDSLGNPTHILRIGESYKEKQRTIQAKKEVEQRRAGGYSRKYASKAKNLADDMVRNTARDLLYYAVTQDAMLIFENLSRGFGRQGKRTFMAERQYTRMEDWLTAKLAYNGLPSKTYLSKTLAQYTSKTCSNCGFTITSADYDRVLEKLKKTATGWMTTINGKELKVEGQITYYNRYKRQNVVKDLSVELDRLSEESVNNDISSWTKGRSGEALSLLKKRFSHRPVQEKFVCLNCGFETHADEQAALNIARSWLFLRSQEYKKYQTNKTTGNTDKRAFVETWQSFYRKKLKEVWKPAV

SEQ ID NO: 49100 - protein, 979 aa, synthetic construct
  REGION 1..979: note = engineered CasX variant
QEIKRINKIRRRLVKDSNTKKAGKTGPMKTLLVRVMTPDLRERLENLRKKPENIPQPISNTSRANLNKLLTDYTEMKKAILHVYWEEFQKDPVGLMSRVAQPASKKIDQNKLKPEMDEKGNLTTAGFACSQCGQPLFVYKLEQVSEKGKAYTNYFGRCNVAEHEKLIQLAQLKPEKDSDEAVTYSLGKFGQRALDFYSIHVTKESTHPVKPLAQIAGNRYASGPVGKALRDACMGTIASFLSKYQDIIIEHQKVVKGNQKRLESLRELAGKENLEYPSVTLPPQPHTKEGVDAYNEVIARVRMWVNLNLWQKLKLSRDDAKPLLRLKGFPSFPLVERQANAEVDWWDMVCNVKKLINEKKEDGKVFWQNLAGYKRQEALRPYLSSEEDRKKGKKFARYQLGDLLLHLEKKHGEDWGKVYDEAWERIDKKVEGLSKHIKLEEERRSEDAQSKAALTDWLRAKASFVIEGLKEADKDEFCRCELKLQKWYGDLRGKPFAIEAENSILDISGFSKQYNCAFIWQKDGVKKLNLYLIINYFKGGKLRFKKIKPEAFEANRFYTVINKKSGEIVPMEVNFNFDDPNLIILPLAFGKRQGREFIWNDLLSLETGSLKLANGRVIEKTLYNRRTRQDEPALFVALTFERREVLDSSNIKPMNLIGVDRGENIPAVIALTDPEGCPLSRFKDSLGNPTHILRIGESYKEKQRTIQAKKEVEQRRAGGYSRKYASKAKNLADDMVRNTARDLLYYAVTQDAMLIFENLSRGFGRQGKRTFMAERQYTRMEDWLTAKLAYEGLPSKTYLSKTLAQYTSKTCSNCGFTITSADYDRVLEKLKKTATGWMTTINGKELKVEGQITYYNRYKRQNVVKDLSVELDRLSEESVNNDISSWTKGRSGEALSLLKKRFSHRPVQEKFVCLNCGFETHADEQAALNIARSWLFLRSQEYKKYQTNKTTGNTDKRAFVETWQSFYRKKLKEVWKPAV

SEQ ID NO: 49101 - protein, 979 aa, synthetic construct
  REGION 1..979: note = engineered CasX variant
QEIKRINKIRRRLVKDSNTKKAGKTGPMKTLLVRVMTPDLRERLENLRKKPENIPQPISNTSRANLNKLLTDYTEMKKAILHVYWEEFQKDPVGLMSRVAQPASKKIDQNKLKPEMDEKGNLTTAGFACSQCGQPLFVYKLEQVSEKGKAYTNYFGRCNVAEHEKLILLAQLKPEKDSDEAVTYSLGKFGQRALDFYSIHVTKESTHPVKPLAQIAGNRYASGPVGKALRDACMGTIASFLSKYQDIIIEHQKVVKGNQKRLESLRELAGKENLEYPSVTLPPQPHTKEGVDAYNEVIARVRMWVNLNLWQKLKLSRDDAKPLLRLKGFPSFPLVERQANAEVDWWDMVCNVKKLINEKKEDGKVFWQNLAIYKRQEALRPYLSSEEDRKKGKKFARYQLGDLLLHLEKKHGEDWGKVYDEAWERIDKKVEGLSKHIKLEEERRSEDAQSKAALTDWLRAKASFVIEGLKEADKDEFCRCELKLQKWYGDLRGKPFAIEAENSILDISGFSKQYNCAFIWQKDGVKKLNLYLIINYFKGGKLRFKKIKPEAFEANRFYTVINKKSGEIVPMEVNFNFDDPNLIILPLAFGKRQGREFIWNDLLSLETGSLKLANGRVIEKTLYNRRTRQDEPALFVALTFERREVLDSSNIKPMNLIGVDRGENIPAVIALTDPEGCPLSRFKDSLGNPTHILRIGESYKEKQRTIQAKKEVEQRRAGGYSRKYASKAKNLADDMVRNTARDLLYYAVTQDAMLIFENLSRGFGRQGKRTFMAERQYTRMEDWLTAKLAYEGLPSKTYLSKTLAQYTSKTCSNCGFTITSADYDRVLEKLKKTATGWMTTINGKELKVEGQITYYNRYKRQNVVKDLSVELDRLSEESVNNDISSWTKGRSGEALSLLKKRFSHRPVQEKFVCLNCGFETHADEQAALNIARSWLFLRSQEYKKYQTNKTTGNTDKRAFVETWQSFYRKKLKEVWKPAV

SEQ ID NO: 49102 - protein, 979 aa, synthetic construct
  REGION 1..979: note = engineered CasX variant
QEIKRINKIRRRLVKDSNTKKAGKTGPMKTLLVRVMTPDLRERLENLRKKPENIPQPISNTSRANLNKLLTDYTEMKKAILHVYWEEFQKDPVGLMSRVAQPASKKIDQNKLKPEMDEKGNLTTAGFACSQCGQPLFVYKLEQVSEKGKAYTNYFGRCNVAEHEKLILLAQLKPEKDSDEAVTYSLGKFGQRALDFYSIHVTKESTHPVKPLAQIAGNRYASGPVGKALRDACMGTIASFLSKYQDIIIEHQKVVKGNQKRLESLRELAGKENLEYPSVTLPPQPHTKEGVDAYNEVIARVRMWVNLNLWQKLKLSRDDAKPLLRLKGFPSFPLVERQANAEVDWWDMVCNVKKLINEKKEDGKVFWQNLAGYKRQEALRPYLSSEEDREKGKKFARYQLGDLLLHLEKKHGEDWGKVYDEAWERIDKKVEGLSKHIKLEEERRSEDAQSKAALTDWLRAKASFVIEGLKEADKDEFCRCELKLQKWYGDLRGKPFAIEAENSILDISGFSKQYNCAFIWQKDGVKKLNLYLIINYFKGGKLRFKKIKPEAFEANRFYTVINKKSGEIVPMEVNFNFDDPNLIILPLAFGKRQGREFIWNDLLSLETGSLKLANGRVIEKTLYNRRTRQDEPALFVALTFERREVLDSSNIKPMNLIGVDRGENIPAVIALTDPEGCPLSRFKDSLGNPTHILRIGESYKEKQRTIQAKKEVEQRRAGGYSRKYASKAKNLADDMVRNTARDLLYYAVTQDAMLIFENLSRGFGRQGKRTFMAERQYTRMEDWLTAKLAYEGLPSKTYLSKTLAQYTSKTCSNCGFTITSADYDRVLEKLKKTATGWMTTINGKELKVEGQITYYNRYKRQNVVKDLSVELDRLSEESVNNDISSWTKGRSGEALSLLKKRFSHRPVQEKFVCLNCGFETHADEQAALNIARSWLFLRSQEYKKYQTNKTTGNTDKRAFVETWQSFYRKKLKEVWKPAV

SEQ ID NO: 49103 - protein, 979 aa, synthetic construct
  REGION 1..979: note = engineered CasX variant
QEIKRINKIRRRLVKDSNTKKAGKTGPMKTLLVRVMTPDLRERLENLRKKPENIPQPISNTSRANLNKLLTDYTEMKKAILHVYWEEFQKDPVGLMSRVAQPASKKIDQNKLKPEMDEKGNLTTAGFACSQCGQPLFVYKLEQVSEKGKAYTNYFGRCNVAEHEKLILLAQLKPEKDSDEAVTYSLGKFGQRALDFYSIHVTKESTHPVKPLAQIAGNRYASGPVGKALRDACMGTIASFLSKYQDIIIEHQKVVKGNQKRLESLRELAGKENLEYPSVTLPPQPHTKEGVDAYNEVIARVRMWVNLNLWQKLKLSRDDAKPLLRLKGFPSFPLVERQANAEVDWWDMVCNVKKLINEKKEDGKVFWQNLAGYKRQEALRPYLSSEEDRKKGKKFARYQLGDLLLHLEKKHGEDWGKVYDEAWERIDKKVEGLSKHIKLEEERRSEDAQSKAALTDWLRAKASFVIEGLKEADKDEFCRCELKLQKWYGDLRGKPFAIEAENSILDISGFSKQYNCAFIWQKDGVKKLNLYLIINYFKGGKLRFKKIKPEAFEANRFYTVINKKSGEIVIMEVNFNFDDPNLIILPLAFGKRQGREFIWNDLLSLETGSLKLANGRVIEKTLYNRRTRQDEPALFVALTFERREVLDSSNIKPMNLIGVDRGENIPAVIALTDPEGCPLSRFKDSLGNPTHILRIGESYKEKQRTIQAKKEVEQRRAGGYSRKYASKAKNLADDMVRNTARDLLYYAVTQDAMLIFENLSRGFGRQGKRTFMAERQYTRMEDWLTAKLAYEGLPSKTYLSKTLAQYTSKTCSNCGFTITSADYDRVLEKLKKTATGWMTTINGKELKVEGQITYYNRYKRQNVVKDLSVELDRLSEESVNNDISSWTKGRSGEALSLLKKRFSHRPVQEKFVCLNCGFETHADEQAALNIARSWLFLRSQEYKKYQTNKTTGNTDKRAFVETWQSFYRKKLKEVWKPAV

SEQ ID NO: 49104 - protein, 978 aa, synthetic construct
  REGION 1..978: note = engineered CasX variant
QEIKRINKIRRRLVKDSNTKKAGKTGPMKTLLVRVMTPDLRERLENLRKKPENIPQPISNTSRANLNKLLTDYTEMKKAILHVYWEEFQKDPVGLMSRVAQPASKKIDQNKLKPEMDEKGNLTTAGFACSQCGQPLFVYKLEQVSEKGKAYTNYFGRCNVAEHEKLILLAQLKPEKDSDEAVTYSLGKFGQRALDFYSIHVTKESTHPVKPLAQIAGNRYASGPVGKALRGACMGTIASFLSKYQDIIIEHQKVVKGNQKRLESLRELAGKENLEYPSVTLPPQPHTKEGVDAYNEVIARVRMWVNLNLWQKLKLSRDDAKPLLRLKGFPSFPLVERQANEVDWWDMVCNVKKLINEKKEDGKVFWQNLAGYKRQEALRPYLSSEEDRKKGKKFARTQLGDLLLHLEKKHGEDWGKVYDEAWERIDKKVEGLSKHIKLEEERRSEDAQSKAALTDWLRAKASFVIEGLKEADKDEFCRCELKLQKWYGDLRGKPFAIEAENSILDISGFSKQYNCAFIWQKDGVKKLNLYLIINYFKGGKLRFKKIKPEAFEANRFYTVINKKSGEIVPMEVNFNFDDPNLIILPLAFGKRQGREFIWNDLLSLETGSLKLANGRVIEKTLYNRRTRQDEPALFVALTFERREVLDSSNIKPMNLIGVDRGENIPAVIALTDPEGCPLSRFKDSLGNPTHILRIGESYKEKQRTIQAKKEVEQRRAGGYSRKYASKAKNLADDMVRNTARDLLYYAVTQDAMLIFENLSRGFGRQGKRTFMAERQYTRMEDWLTAKLAYEGLPSKTYLSKTLAQYTSKTCSNCGFTITSADYDRVLEKLKKTATGWMTTINGKELKVEGQITYYNRYKRQNVVKDLSVELDRLSEESVNNDISSWTKGRSGEALSLLKKRFSHRPVQEKFVCLNCGFETHADEQAALNIARSWLFLRSQEYKKYQTNKTTGNTDKRAFVETWQSFYRKKLKEVWKPAV

SEQ ID NO: 49105 - protein, 978 aa, synthetic construct
  REGION 1..978: note = engineered CasX variant
QEIKRINKIRRRLVKDSNTKKAGKTGPMKTLLVRVMTPDLRERLENLRKKPENIPQPISNTSRANLNKLLTDYTEMKKAILHVYWEEFQKDPVGLMSRVAQPASKKIDQNKLKPEMDEKGNLTTAGFACSQCGQPLFVYKLEQVSEKGKAYTNYFGRCNVAEHEKLILLAQLKPEKDSDEAVTYSLGKFGQRALDFYSIHVTKESTHPVKPLAQIAGNRYASGPVGKALRDACMGTIASFLSKYQDIIIEHQKVVKGNQKRLESLRELAGKENLEYPSVTLPPQPHTKEGVDAYNEVIARVRMWVNLNLWQKLKLSRDDAKPLLRLKNFPSFPLVERQANEVDWWDMVCNVKKLINEKKEDGKVFWQNLAGYKRQEALRPYLSSEEDRKKGKKFARTQLGDLLLHLEKKHGEDWGKVYDEAWERIDKKVEGLSKHIKLEEERRSEDAQSKAALTDWLRAKASFVIEGLKEADKDEFCRCELKLQKWYGDLRGKPFAIEAENSILDISGFSKQYNCAFIWQKDGVKKLNLYLIINYFKGGKLRFKKIKPEAFEANRFYTVINKKSGEIVPMEVNFNFDDPNLIILPLAFGKRQGREFIWNDLLSLETGSLKLANGRVIEKTLYNRRTRQDEPALFVALTFERREVLDSSNIKPMNLIGVDRGENIPAVIALTDPEGCPLSRFKDSLGNPTHILRIGESYKEKQRTIQAKKEVEQRRAGGYSRKYASKAKNLADDMVRNTARDLLYYAVTQDAMLIFENLSRGFGRQGKRTFMAERQYTRMEDWLTAKLAYEGLPSKTYLSKTLAQYTSKTCSNCGFTITSADYDRVLEKLKKTATGWMTTINGKELKVEGQITYYNRYKRQNVVKDLSVELDRLSEESVNNDISSWTKGRSGEALSLLKKRFSHRPVQEKFVCLNCGFETHADEQAALNIARSWLFLRSQEYKKYQTNKTTGNTDKRAFVETWQSFYRKKLKEVWKPAV

SEQ ID NO: 49106 - protein, 978 aa, synthetic construct
  REGION 1..978: note = engineered CasX variant
QEIKRINKIRRRLVKDSNTKKAGKTGPMKTLLVRVMTPDLRERLENLRKKPENIPQPISNTSRANLNKLLTDYTEMKKAILHVYWEEFQKDPVGLMSRVAQPASKKIDQNKLKPEMDEKGNLTTAGFACSQCGQPLFVYKLEQVSEKGKAYTNYFGRCNVAEHEKLILLAQLKPEKDSDEAVTYSLGKFGQRALDFYSIHVTKESTHPVKPLAQIAGNRYASGPVGKALRDACMGTIASFLSKYQDIIIEHQKVVKGNQKRLESLRELAGKENLEYPSVTLPPQPHTKEGVDAYNEVIARVRMWVNLNLWQKLKLSRDDAKPLLRLKGFPSFPLVERQANEVDWWDMVCNVKKLINEKKEDGKVFWQNLAGYKRQEALRPYLSSEEDRKKGKKFARTQLGDLLNHLEKKHGEDWGKVYDEAWERIDKKVEGLSKHIKLEEERRSEDAQSKAALTDWLRAKASFVIEGLKEADKDEFCRCELKLQKWYGDLRGKPFAIEAENSILDISGFSKQYNCAFIWQKDGVKKLNLYLIINYFKGGKLRFKKIKPEAFEANRFYTVINKKSGEIVPMEVNFNFDDPNLIILPLAFGKRQGREFIWNDLLSLETGSLKLANGRVIEKTLYNRRTRQDEPALFVALTFERREVLDSSNIKPMNLIGVDRGENIPAVIALTDPEGCPLSRFKDSLGNPTHILRIGESYKEKQRTIQAKKEVEQRRAGGYSRKYASKAKNLADDMVRNTARDLLYYAVTQDAMLIFENLSRGFGRQGKRTFMAERQYTRMEDWLTAKLAYEGLPSKTYLSKTLAQYTSKTCSNCGFTITSADYDRVLEKLKKTATGWMTTINGKELKVEGQITYYNRYKRQNVVKDLSVELDRLSEESVNNDISSWTKGRSGEALSLLKKRFSHRPVQEKFVCLNCGFETHADEQAALNIARSWLFLRSQEYKKYQTNKTTGNTDKRAFVETWQSFYRKKLKEVWKPAV

SEQ ID NO: 49107 - protein, 978 aa, synthetic construct
  REGION 1..978: note = engineered CasX variant
QEIKRINKIRRRLVKDSNTKKAGKTGPMKTLLVRVMTPDLRERLENLRKKPENIPQPISNTSRANLNKLLTDYTEMKKAILHVYWEEFQKDPVGLMSRVAQPASKKIDQNKLKPEMDEKGNLTTAGFACSQCGQPLFVYKLEQVSEKGKAYTNYFGRCNVAEHEKLILLAQLKPEKDSDEAVTYSLGKFGQRALDFYSIHVTKESTHPVKPLAQIAGNRYASGPVGKALRDACMGTIASFLSKYQDIIIEHQKVVKGNQKRLESLRELAGKENLEYPSVTLPPQPHTKEGVDAYNEVIARVRMWVNLNLWQKLKLSRDDAKPLLRLKGFPSFPLVERQANEVDWWDMVCNVKKLINEKKEDGKVFWQNLAGYKRQEALRPYLSSEEDRKKGKKFARTQLGDLLWHLEKKHGEDWGKVYDEAWERIDKKVEGLSKHIKLEEERRSEDAQSKAALTDWLRAKASFVIEGLKEADKDEFCRCELKLQKWYGDLRGKPFAIEAENSILDISGFSKQYNCAFIWQKDGVKKLNLYLIINYFKGGKLRFKKIKPEAFEANRFYTVINKKSGEIVPMEVNFNFDDPNLIILPLAFGKRQGREFIWNDLLSLETGSLKLANGRVIEKTLYNRRTRQDEPALFVALTFERREVLDSSNIKPMNLIGVDRGENIPAVIALTDPEGCPLSRFKDSLGNPTHILRIGESYKEKQRTIQAKKEVEQRRAGGYSRKYASKAKNLADDMVRNTARDLLYYAVTQDAMLIFENLSRGFGRQGKRTFMAERQYTRMEDWLTAKLAYEGLPSKTYLSKTLAQYTSKTCSNCGFTITSADYDRVLEKLKKTATGWMTTINGKELKVEGQITYYNRYKRQNVVKDLSVELDRLSEESVNNDISSWTKGRSGEALSLLKKRFSHRPVQEKFVCLNCGFETHADEQAALNIARSWLFLRSQEYKKYQTNKTTGNTDKRAFVETWQSFYRKKLKEVWKPAV

SEQ ID NO: 49108 - protein, 978 aa, synthetic construct
  REGION 1..978: note = engineered CasX variant
QEIKRINKIRRRLVKDSNTKKAGKTGPMKTLLVRVMTPDLRERLENLRKKPENIPQPISNTSRANLNKLLTDYTEMKKAILHVYWEEFQKDPVGLMSRVAQPASKKIDQNKLKPEMDEKGNLTTAGFACSQCGQPLFVYKLEQVSEKGKAYTNYFGRCNVAEHEKLILLAQLKPEKDSDEAVTYSLGKFGQRALDFYSIHVTKESTHPVKPLAQIAGNRYASGPVGKALRDACMGTIASFLSKYQDIIIEHQKVVKGNQKRLESLRELAGKENLEYPSVTLPPQPHTKEGVDAYNEVIARVRMWVNLNLWQKLKLSRDDAKPLLRLKGFPSFPLVERQANEVDWWDMVCNVKKLINEKKEDGKVFWQNLAGYKRQEALRPYLSSEEDRKKGKKFARTQLGDLLLHLYKKHGEDWGKVYDEAWERIDKKVEGLSKHIKLEEERRSEDAQSKAALTDWLRAKASFVIEGLKEADKDEFCRCELKLQKWYGDLRGKPFAIEAENSILDISGFSKQYNCAFIWQKDGVKKLNLYLIINYFKGGKLRFKKIKPEAFEANRFYTVINKKSGEIVPMEVNFNFDDPNLIILPLAFGKRQGREFIWNDLLSLETGSLKLANGRVIEKTLYNRRTRQDEPALFVALTFERREVLDSSNIKPMNLIGVDRGENIPAVIALTDPEGCPLSRFKDSLGNPTHILRIGESYKEKQRTIQAKKEVEQRRAGGYSRKYASKAKNLADDMVRNTARDLLYYAVTQDAMLIFENLSRGFGRQGKRTFMAERQYTRMEDWLTAKLAYEGLPSKTYLSKTLAQYTSKTCSNCGFTITSADYDRVLEKLKKTATGWMTTINGKELKVEGQITYYNRYKRQNVVKDLSVELDRLSEESVNNDISSWTKGRSGEALSLLKKRFSHRPVQEKFVCLNCGFETHADEQAALNIARSWLFLRSQEYKKYQTNKTTGNTDKRAFVETWQSFYRKKLKEVWKPAV

SEQ ID NO: 49109 - protein, 978 aa, synthetic construct
  REGION 1..978: note = engineered CasX variant
QEIKRINKIRRRLVKDSNTKKAGKTGPMKTLLVRVMTPDLRERLENLRKKPENIPQPISNTSRANLNKLLTDYTEMKKAILHVYWEEFQKDPVGLMSRVAQPASKKIDQNKLKPEMDEKGNLTTAGFACSQCGQPLFVYKLEQVSEKGKAYTNYFGRCNVAEHEKLILLAQLKPEKDSDEAVTYSLGKFGQRALDFYSIHVTKESTHPVKPLAQIAGNRYASGPVGKALRDACMGTIASFLSKYQDIIIEHQKVVKGNQKRLESLRELAGKENLEYPSVTLPPQPHTKEGVDAYNEVIARVRMWVNLNLWQKLKLSRDDAKPLLRLKGFPSFPLVERQANEVDWWDMVCNVKKLINEKKEDGKVFWQNLAGYKRQEALRPYLSSEEDRKKGKKFARTQLGDLLLHLEKKHPEDWGKVYDEAWERIDKKVEGLSKHIKLEEERRSEDAQSKAALTDWLRAKASFVIEGLKEADKDEFCRCELKLQKWYGDLRGKPFAIEAENSILDISGFSKQYNCAFIWQKDGVKKLNLYLIINYFKGGKLRFKKIKPEAFEANRFYTVINKKSGEIVPMEVNFNFDDPNLIILPLAFGKRQGREFIWNDLLSLETGSLKLANGRVIEKTLYNRRTRQDEPALFVALTFERREVLDSSNIKPMNLIGVDRGENIPAVIALTDPEGCPLSRFKDSLGNPTHILRIGESYKEKQRTIQAKKEVEQRRAGGYSRKYASKAKNLADDMVRNTARDLLYYAVTQDAMLIFENLSRGFGRQGKRTFMAERQYTRMEDWLTAKLAYEGLPSKTYLSKTLAQYTSKTCSNCGFTITSADYDRVLEKLKKTATGWMTTINGKELKVEGQITYYNRYKRQNVVKDLSVELDRLSEESVNNDISSWTKGRSGEALSLLKKRFSHRPVQEKFVCLNCGFETHADEQAALNIARSWLFLRSQEYKKYQTNKTTGNTDKRAFVETWQSFYRKKLKEVWKPAV

SEQ ID NO: 49110 - protein, 979 aa, synthetic construct
  REGION 1..979: note = engineered CasX variant
QEIKRINKIRRRLVKDSNTKKAGKTGPMKTLLVRVMTPDLRERLENLRKKPENIPQPISNTSRANLNKLLTDYTEMKKAILHVYWEEFQKDPVGLMSRVAQPASKKIDQNKLKPEMDEKGNLTTAGFACSQCGQPLFVYKLEQVSEKGKAYTNYFGRCNVAEHEKLILLAQLKPEKDSDEAVTYSLGKFGQRALDFYSIHVTKESTHPVKPLAQIAGNRYASGPVGKALRDACMGTIASFLSKYQDIIIEHQKVVKGNQKRLESLRELAGKENLEYPSVTLPPQPHTKEGVDAYNEVIARVRMWVNLNLWQKLKLSRDDAKPLLRLKGFPSFPLVERQANEVDWWDMVCNVKKLINEKKEDGKVFWQNLAGYKRQEALRPYLSSEEDRKKGKKFARTQLGDLLLHLEKKHGERDWGKVYDEAWERIDKKVEGLSKHIKLEEERRSEDAQSKAALTDWLRAKASFVIEGLKEADKDEFCRCELKLQKWYGDLRGKPFAIEAENSILDISGFSKQYNCAFIWQKDGVKKLNLYLIINYFKGGKLRFKKIKPEAFEANRFYTVINKKSGEIVPMEVNFNFDDPNLIILPLAFGKRQGREFIWNDLLSLETGSLKLANGRVIEKTLYNRRTRQDEPALFVALTFERREVLDSSNIKPMNLIGVDRGENIPAVIALTDPEGCPLSRFKDSLGNPTHILRIGESYKEKQRTIQAKKEVEQRRAGGYSRKYASKAKNLADDMVRNTARDLLYYAVTQDAMLIFENLSRGFGRQGKRTFMAERQYTRMEDWLTAKLAYEGLPSKTYLSKTLAQYTSKTCSNCGFTITSADYDRVLEKLKKTATGWMTTINGKELKVEGQITYYNRYKRQNVVKDLSVELDRLSEESVNNDISSWTKGRSGEALSLLKKRFSHRPVQEKFVCLNCGFETHADEQAALNIARSWLFLRSQEYKKYQTNKTTGNTDKRAFVETWQSFYRKKLKEVWKPAV

SEQ ID NO: 49111 - protein, 979 aa, synthetic construct
  REGION 1..979: note = engineered CasX variant
QEIKRINKIRRRLVKDSNTKKAGKTGPMKTLLVRVMTPDLRERLENLRKKPENIPQPISNTSRANLNKLLTDYTEMKKAILHVYWEEFQKDPVGLMSRVAQPASKKIDQNKLKPEMDEKGNLTTAGFACSQCGQPLFVYKLEQVSEKGKAYTNYFGRCNVAEHEKLILLAQLKPEKDSDEAVTYSLGKFGQRALDFYSIHVTKESTHPVKPLAQIAGNRYASGPVGKALRDACMGTIASFLSKYQDIIIEHQKVVKGNQKRLESLRELAGKENLEYPSVTLPPQPHTKEGVDAYNEVIARVRMWVNLNLWQKLKLSRDDAKPLLRLKGFPSFPLVERQANEVDWWDMVCNVKKLINEKKEDGKVFWQNLAGYKRQEALRPYLSSEEDRKKGKKFARTQLGDLLLHLEKKHGEYDWGKVYDEAWERIDKKVEGLSKHIKLEEERRSEDAQSKAALTDWLRAKASFVIEGLKEADKDEFCRCELKLQKWYGDLRGKPFAIEAENSILDISGFSKQYNCAFIWQKDGVKKLNLYLIINYFKGGKLRFKKIKPEAFEANRFYTVINKKSGEIVPMEVNFNFDDPNLIILPLAFGKRQGREFIWNDLLSLETGSLKLANGRVIEKTLYNRRTRQDEPALFVALTFERREVLDSSNIKPMNLIGVDRGENIPAVIALTDPEGCPLSRFKDSLGNPTHILRIGESYKEKQRTIQAKKEVEQRRAGGYSRKYASKAKNLADDMVRNTARDLLYYAVTQDAMLIFENLSRGFGRQGKRTFMAERQYTRMEDWLTAKLAYEGLPSKTYLSKTLAQYTSKTCSNCGFTITSADYDRVLEKLKKTATGWMTTINGKELKVEGQITYYNRYKRQNVVKDLSVELDRLSEESVNNDISSWTKGRSGEALSLLKKRFSHRPVQEKFVCLNCGFETHADEQAALNIARSWLFLRSQEYKKYQTNKTTGNTDKRAFVETWQSFYRKKLKEVWKPAV

SEQ ID NO: 49112 - protein, 978 aa, synthetic construct
  REGION 1..978: note = engineered CasX variant
QEIKRINKIRRRLVKDSNTKKAGKTGPMKTLLVRVMTPDLRERLENLRKKPENIPQPISNTSRANLNKLLTDYTEMKKAILHVYWEEFQKDPVGLMSRVAQPASKKIDQNKLKPEMDEKGNLTTAGFACSQCGQPLFVYKLEQVSEKGKAYTNYFGRCNVAEHEKLILLAQLKPEKDSDEAVTYSLGKFGQRALDFYSIHVTKESTHPVKPLAQIAGNRYASGPVGKALRDACMGTIASFLSKYQDIIIEHQKVVKGNQKRLESLRELAGKENLEYPSVTLPPQPHTKEGVDAYNEVIARVRMWVNLNLWQKLKLSRDDAKPLLRLKGFPSFPLVERQANEVDWWDMVCNVKKLINEKKEDGKVFWQNLAGYKRQEALRPYLSSEEDRKKGKKFARTQLGDLLLHLEKKHGEDWGDVYDEAWERIDKKVEGLSKHIKLEEERRSEDAQSKAALTDWLRAKASFVIEGLKEADKDEFCRCELKLQKWYGDLRGKPFAIEAENSILDISGFSKQYNCAFIWQKDGVKKLNLYLIINYFKGGKLRFKKIKPEAFEANRFYTVINKKSGEIVPMEVNFNFDDPNLIILPLAFGKRQGREFIWNDLLSLETGSLKLANGRVIEKTLYNRRTRQDEPALFVALTFERREVLDSSNIKPMNLIGVDRGENIPAVIALTDPEGCPLSRFKDSLGNPTHILRIGESYKEKQRTIQAKKEVEQRRAGGYSRKYASKAKNLADDMVRNTARDLLYYAVTQDAMLIFENLSRGFGRQGKRTFMAERQYTRMEDWLTAKLAYEGLPSKTYLSKTLAQYTSKTCSNCGFTITSADYDRVLEKLKKTATGWMTTINGKELKVEGQITYYNRYKRQNVVKDLSVELDRLSEESVNNDISSWTKGRSGEALSLLKKRFSHRPVQEKFVCLNCGFETHADEQAALNIARSWLFLRSQEYKKYQTNKTTGNTDKRAFVETWQSFYRKKLKEVWKPAV

SEQ ID NO: 49113 - protein, 978 aa, synthetic construct
  REGION 1..978: note = engineered CasX variant
QEIKRINKIRRRLVKDSNTKKAGKTGPMKTLLVRVMTPDLRERLENLRKKPENIPQPISNTSRANLNKLLTDYTEMKKAILHVYWEEFQKDPVGLMSRVAQPASKKIDQNKLKPEMDEKGNLTTAGFACSQCGQPLFVYKLEQVSEKGKAYTNYFGRCNVAEHEKLILLAQLKPEKDSDEAVTYSLGKFGQRALDFYSIHVTKESTHPVKPLAQIAGNRYASGPVGKALRDACMGTIASFLSKYQDIIIEHQKVVKGNQKRLESLRELAGKENLEYPSVTLPPQPHTKEGVDAYNEVIARVRMWVNLNLWQKLKLSRDDAKPLLRLKGFPSFPLVERQANEVDWWDMVCNVKKLINEKKEDGKVFWQNLAGYKRQEALRPYLSSEEDRKKGKKFARTQLGDLLLHLEKKHGEDWGKVYGEAWERIDKKVEGLSKHIKLEEERRSEDAQSKAALTDWLRAKASFVIEGLKEADKDEFCRCELKLQKWYGDLRGKPFAIEAENSILDISGFSKQYNCAFIWQKDGVKKLNLYLIINYFKGGKLRFKKIKPEAFEANRFYTVINKKSGEIVPMEVNFNFDDPNLIILPLAFGKRQGREFIWNDLLSLETGSLKLANGRVIEKTLYNRRTRQDEPALFVALTFERREVLDSSNIKPMNLIGVDRGENIPAVIALTDPEGCPLSRFKDSLGNPTHILRIGESYKEKQRTIQAKKEVEQRRAGGYSRKYASKAKNLADDMVRNTARDLLYYAVTQDAMLIFENLSRGFGRQGKRTFMAERQYTRMEDWLTAKLAYEGLPSKTYLSKTLAQYTSKTCSNCGFTITSADYDRVLEKLKKTATGWMTTINGKELKVEGQITYYNRYKRQNVVKDLSVELDRLSEESVNNDISSWTKGRSGEALSLLKKRFSHRPVQEKFVCLNCGFETHADEQAALNIARSWLFLRSQEYKKYQTNKTTGNTDKRAFVETWQSFYRKKLKEVWKPAV

SEQ ID NO: 49114 - protein, 978 aa, synthetic construct
  REGION 1..978: note = engineered CasX variant
QEIKRINKIRRRLVKDSNTKKAGKTGPMKTLLVRVMTPDLRERLENLRKKPENIPQPISNTSRANLNKLLTDYTEMKKAILHVYWEEFQKDPVGLMSRVAQPASKKIDQNKLKPEMDEKGNLTTAGFACSQCGQPLFVYKLEQVSEKGKAYTNYFGRCNVAEHEKLILLAQLKPEKDSDEAVTYSLGKFGQRALDFYSIHVTKESTHPVKPLAQIAGNRYASGPVGKALRDACMGTIASFLSKYQDIIIEHQKVVKGNQKRLESLRELAGKENLEYPSVTLPPQPHTKEGVDAYNEVIARVRMWVNLNLWQKLKLSRDDAKPLLRLKGFPSFPLVERQANEVDWWDMVCNVKKLINEKKEDGKVFWQNLAGYKRQEALRPYLSSEEDRKKGKKFARTQLGDLLLHLEKKHGEDWGKVYDEAWERIDKKVEGLSKHIKLEEERRSEDAQSKAALTDWLRAKASFVIEGKKEADKDEFCRCELKLQKWYGDLRGKPFAIEAENSILDISGFSKQYNCAFIWQKDGVKKLNLYLIINYFKGGKLRFKKIKPEAFEANRFYTVINKKSGEIVPMEVNFNFDDPNLIILPLAFGKRQGREFIWNDLLSLETGSLKLANGRVIEKTLYNRRTRQDEPALFVALTFERREVLDSSNIKPMNLIGVDRGENIPAVIALTDPEGCPLSRFKDSLGNPTHILRIGESYKEKQRTIQAKKEVEQRRAGGYSRKYASKAKNLADDMVRNTARDLLYYAVTQDAMLIFENLSRGFGRQGKRTFMAERQYTRMEDWLTAKLAYEGLPSKTYLSKTLAQYTSKTCSNCGFTITSADYDRVLEKLKKTATGWMTTINGKELKVEGQITYYNRYKRQNVVKDLSVELDRLSEESVNNDISSWTKGRSGEALSLLKKRFSHRPVQEKFVCLNCGFETHADEQAALNIARSWLFLRSQEYKKYQTNKTTGNTDKRAFVETWQSFYRKKLKEVWKPAV

SEQ ID NO: 49115 - protein, 978 aa, synthetic construct
  REGION 1..978: note = engineered CasX variant
QEIKRINKIRRRLVKDSNTKKAGKTGPMKTLLVRVMTPDLRERLENLRKKPENIPQPISNTSRANLNKLLTDYTEMKKAILHVYWEEFQKDPVGLMSRVAQPASKKIDQNKLKPEMDEKGNLTTAGFACSQCGQPLFVYKLEQVSEKGKAYTNYFGRCNVAEHEKLILLAQLKPEKDSDEAVTYSLGKFGQRALDFYSIHVTKESTHPVKPLAQIAGNRYASGPVGKALRDACMGTIASFLSKYQDIIIEHQKVVKGNQKRLESLRELAGKENLEYPSVTLPPQPHTKEGVDAYNEVIARVRMWVNLNLWQKLKLSRDDAKPLLRLKGFPSFPLVERQANEVDWWDMVCNVKKLINEKKEDGKVFWQNLAGYKRQEALRPYLSSEEDRKKGKKFARTQLGDLLLHLEKKHGEDWGKVYDEAWERIDKKVEGLSKHIKLEEERRSEDAQSKAALTDWLRAKASFVIEGSKEADKDEFCRCELKLQKWYGDLRGKPFAIEAENSILDISGFSKQYNCAFIWQKDGVKKLNLYLIINYFKGGKLRFKKIKPEAFEANRFYTVINKKSGEIVPMEVNFNFDDPNLIILPLAFGKRQGREFIWNDLLSLETGSLKLANGRVIEKTLYNRRTRQDEPALFVALTFERREVLDSSNIKPMNLIGVDRGENIPAVIALTDPEGCPLSRFKDSLGNPTHILRIGESYKEKQRTIQAKKEVEQRRAGGYSRKYASKAKNLADDMVRNTARDLLYYAVTQDAMLIFENLSRGFGRQGKRTFMAERQYTRMEDWLTAKLAYEGLPSKTYLSKTLAQYTSKTCSNCGFTITSADYDRVLEKLKKTATGWMTTINGKELKVEGQITYYNRYKRQNVVKDLSVELDRLSEESVNNDISSWTKGRSGEALSLLKKRFSHRPVQEKFVCLNCGFETHADEQAALNIARSWLFLRSQEYKKYQTNKTTGNTDKRAFVETWQSFYRKKLKEVWKPAV

SEQ ID NO: 49116 - protein, 979 aa, synthetic construct
  REGION 1..979: note = engineered CasX variant
QEIKRINKIRRRLVKDSNTKKAGKTGPMKTLLVRVMTPDLRERLENLRKKPENIPQPISNTSRANLNKLLTDYTEMKKAILHVYWEEFQKDPVGLMSRVAQPASKKIDQNKLKPEMDEKGNLTTAGFACSQCGQPLFVYKLEQVSEKGKAYTNYFGRCNVAEHEKLILLAQLKPEKDSDEAVTYSLGKFGQRALDFYSIHVTKESTHPVKPLAQIAGNRYASGPVGKALRDACMGTIASFLSKYQDIIIEHQKVVKGNQKRLESLRELAGKENLEYPSVTLPPQPHTKEGVDAYNEVIARVRMWVNLNLWQKLKLSRDDAKPLLRLKGFPSFPLVERQANEVDWWDMVCNVKKLINEKKEDGKVFWQNLAGYKRQEALRPYLSSEEDRKKGKKFARTQLGDLLLHLEKKHGEDWGKVYDEAWERIDKKVEGLSKHIKLEEERRSEDAQSKAALTDWLRAKASFVIEGLKEADDKDEFCRCELKLQKWYGDLRGKPFAIEAENSILDISGFSKQYNCAFIWQKDGVKKLNLYLIINYFKGGKLRFKKIKPEAFEANRFYTVINKKSGEIVPMEVNFNFDDPNLIILPLAFGKRQGREFIWNDLLSLETGSLKLANGRVIEKTLYNRRTRQDEPALFVALTFERREVLDSSNIKPMNLIGVDRGENIPAVIALTDPEGCPLSRFKDSLGNPTHILRIGESYKEKQRTIQAKKEVEQRRAGGYSRKYASKAKNLADDMVRNTARDLLYYAVTQDAMLIFENLSRGFGRQGKRTFMAERQYTRMEDWLTAKLAYEGLPSKTYLSKTLAQYTSKTCSNCGFTITSADYDRVLEKLKKTATGWMTTINGKELKVEGQITYYNRYKRQNVVKDLSVELDRLSEESVNNDISSWTKGRSGEALSLLKKRFSHRPVQEKFVCLNCGFETHADEQAALNIARSWLFLRSQEYKKYQTNKTTGNTDKRAFVETWQSFYRKKLKEVWKPAV

SEQ ID NO: 49117 - protein, 979 aa, synthetic construct
  REGION 1..979: note = engineered CasX variant
QEIKRINKIRRRLVKDSNTKKAGKTGPMKTLLVRVMTPDLRERLENLRKKPENIPQPISNTSRANLNKLLTDYTEMKKAILHVYWEEFQKDPVGLMSRVAQPASKKIDQNKLKPEMDEKGNLTTAGFACSQCGQPLFVYKLEQVSEKGKAYTNYFGRCNVAEHEKLILLAQLKPEKDSDEAVTYSLGKFGQRALDFYSIHVTKESTHPVKPLAQIAGNRYASGPVGKALRDACMGTIASFLSKYQDIIIEHQKVVKGNQKRLESLRELAGKENLEYPSVTLPPQPHTKEGVDAYNEVIARVRMWVNLNLWQKLKLSRDDAKPLLRLKGFPSFPLVERQANEVDWWDMVCNVKKLINEKKEDGKVFWQNLAGYKRQEALRPYLSSEEDRKKGKKFARTQLGDLLLHLEKKHGEDWGKVYDEAWERIDKKVEGLSKHIKLEEERRSEDAQSKAALTDWLRAKASFVIEGLKEADKDEFCRCELKLQKWYGDLRGKPFAIEAENSILDISGFSKQYNCAFIWQKDGVKKLNLYLIINYFKGGKLRFKKIKPEAFEANRFYTVINKKSGEIVPMEVNFNFDDPNLIILPLAFGKRQGREFIWNDLLSLETGSLKLANGRVIEKTLYNRRTRQDEPALFVALTFERREVLDSSNIKPMNLIGVDRGENIPAVIALTDPEGCPLSRFKDSLGNPTHILRIGESYKEKQRTIQAKKEVEQRRAGGYSRKYASKAKNLADDMVRNTARDLLYYAVTQDAMLIFENLSRGFGRQGKRTFMAERQYTRMEDWLTAKLAYEGLPSKTYLSKTLAQYTSKTCSNCGFTITSADYDRVLEKLKKTATGWMTTINGKELKVEGQITYYNRYKRQNVVKDLSVELDRLSEESVNNDISSWTKGRSGNEALSLLKKRFSHRPVQEKFVCLNCGFETHADEQAALNIARSWLFLRSQEYKKYQTNKTTGNTDKRAFVETWQSFYRKKLKEVWKPAV

SEQ ID NO: 49118 - protein, 978 aa, synthetic construct
  REGION 1..978: note = engineered CasX variant
QEIKRINKIRRRLVKDSNTKKAGKTGPMKTLLVRVMTPDLRERLENLRKKPENIPQPISNTSRANLNKLLTDYTEMKKAILHVYWEEFQKDPVGLMSRVAQPASKKIDQNKLKPEMDEKGNLTTAGFACSQCGQPLFVYKLEQVSEKGKAYTNYFGRCNVAEHEKLILLAQLKPEKDSDEAVTYSLGKFGQRALDFYSIHVTKESTHPVKPLAQIAGNRYASGPVGKALRDACMGTIASFLSKYQDIIIEHQKVVKGNQKRLESLRELAGKENLEYPSVTLPPQPHTKEGVDAYNEVIARVRMWVNLNLWQKLKLSRDDAKPLLRLKGFPSFPLVERQANEVDWWDMVCNVKKLINEKKEDGKVFWQNLAGYKRQEALRPYLSSEEDRQKGKKFARTQLGDLLLHLEKKHGEDWGKVYDEAWERIDKKVEGLSKHIKLEEERRSEDAQSKAALTDWLRAKASFVIEGLKEADKDEFCRCELKLQKWYGDLRGKPFAIEAENSILDISGFSKQYNCAFIWQKDGVKKLNLYLIINYFKGGKLRFKKIKPEAFEANRFYTVINKKSGEIVPMEVNFNFDDPNLIILPLAFGKRQGREFIWNDLLSLETGSLKLANGRVIEKTLYNRRTRQDEPALFVALTFERREVLDSSNIKPMNLIGVDRGENIPAVIALTDPEGCPLSRFKDSLGNPTHILRIGESYKEKQRTIQAKKEVEQRRAGGYSRKYASKAKNLADDMVRNTARDLLYYAVTQDAMLIFENLSRGFGRQGKRTFMAERQYTRMEDWLTAKLAYEGLPSKTYLSKTLAQYTSKTCSNCGFTITSADYDRVLEKLKKTATGWMTTINGKELKVEGQITYYNRYKRQNVVKDLSVELDRLSEESVNNDISSWTKGRSGEALSLLKKRFSHRPVQEKFVCLNCGFETHADEQAALNIARSWLFLRSQEYKKYQTNKTTGNTDKRAFVETWQSFYRKKLKEVWKPAV

SEQ ID NO: 49119 - protein, 978 aa, synthetic construct
  REGION 1..978: note = engineered CasX variant
QEIKRINKIRRRLVKDSNTKKAGKTGPMKTLLVRVMTPDLRERLENLRKKPENIPQPISNTSRANLNKLLTDYTEMKKAILHVYWEEFQKDPVGLMSRVAQPASKKIDQNKLKPEMDEKGNLTTAGFACSQCGQPLFVYKLEQVSEKGKAYTNYFGRCNVAEHEKLILLAQLKPEKDSDEAVTYSLGKFGQRALDFYSIHVTKESTHPVKPLAQIAGNRYASGPVGKALRDACMGTIASFLSKYQDIIIEHQKVVKGNQKRLESLRELAGKENLEYPSVTLPPQPHTKEGVDAYNEVIARVRMWVNLNLWQKLKLSRDDAKPLLRLKGFPSFPLVERQANEVDWWDMVCNVKKLINEKKEDGKVFWQNLAGYKRQEALRPYLSSEEDRKKGKKFARTQLGDLLLHLEKKHGEDWGKVYDEAWERIDKKVEGLSKHIKLEEERRSEDAQSKAALTDWLRAKASFVIEGLKEADKDEFCRCELKLQKWYGDLRGKPFAIEAENSILDISGFSKQYNCAFIWQKDGVKKLNLYLIINYFKGGKLRFKKIKPEAFEANRFYTVINKKSGEIVPMEVNFNFDDPNLIILPLAFGKRQGREFIWNDLLSLETGSLKLANGRVIEKTLYNRRTRQDEPALFVALTFERREVLDSSNIKPMNLIGVDRGENIPAVIALTDPEGCPLSRFKDSLGNPTHILRIGESYKEKQRTIQAKKEVEQRRAGGYSRKYASKAKNLADDMVRNTARDLLYYAVTQDAMLIFENLSRGFGRQGKRTFMAERQYTRMEDWLTAKLAYEGLPSQTYLSKTLAQYTSKTCSNCGFTITSADYDRVLEKLKKTATGWMTTINGKELKVEGQITYYNRYKRQNVVKDLSVELDRLSEESVNNDISSWTKGRSGEALSLLKKRFSHRPVQEKFVCLNCGFETHADEQAALNIARSWLFLRSQEYKKYQTNKTTGNTDKRAFVETWQSFYRKKLKEVWKPAV

SEQ ID NO: 49120 - protein, 978 aa, synthetic construct
  REGION 1..978: note = engineered CasX variant
QEIKRINKIRRRLVKDSNTKKAGKTGPMKTLLVRVMTPDLRERLENLRKKPENIPQPISNTSRANLNKLLTDYTEMKKAILHVYWEEFQKDPVGLMSRVAQPASKKIDQNKLKPEMDEKGNLTTAGFACSQCGQPLFVYKLEQVSEKGKAYTNYFGRCNVAEHEKLILLAQLKPEKDSDEAVTYSLGKFGQRALDFYSIHVTKESTHPVKPLAQIAGNRYASGPVGKALRDACMGTIASFLSKYQDIIIEHQKVVKGNQKRLESLRELAGKENLEYPSVTLPPQPHTKEGVDAYNEVIARVRMWVNLNLWQKLKLSRDDAKPLLRLKGFPSFPLVERQANEVDWWDMVCNVKKLINEKKEDGKVFWQNLAGYKRQEALRPYLSSEEDRKKGKKFARTQLGDLLLHLEKKHGEDWGKVYDEAWERIDKKVEGLSKHIKLEEERRSEDAQSKAALTDWLRAKASFVIEGLKEADKDEFCRCELKLQKWYGDLRGKPFAIEAENSILDISGFSKQYNCAFIWQKDGVKKLNLYLIINYFKGGKLRFKKIKPEAFEANRFYTVINKKSGEIVPMEVNFNFDDPNLIILPLAFGKRQGREFIWNDLLSLETGSLKLANGRVIEKTLYNRRTRQDEPALFVALTFERREVLDSSNIKPMNLIGVDRGENIPAVIALTDPEGCPLSRFKDSLGNPTHILRIGESYKEKQRTIQAKKEVEQRRAGGYSRKYASKAKNLADDMVRNTARDLLYYAVTQDAMLIFENLSRGFGRQGKRTFMAERQYTRMEDWLTAKLAYNGLPSKTYLSKTLAQYTSKTCSNCGFTITSADYDRVLEKLKKTATGWMTTINGKELKVEGQITYYNRYKRQNVVKDLSVELDRLSEESVNNDISSWTKGRSGEALSLLKKRFSHRPVQEKFVCLNCGFETHADEQAALNIARSWLFLRSQEYKKYQTNKTTGNTDKRAFVETWQSFYRKKLKEVWKPAV

SEQ ID NO: 49121 - protein, 978 aa, synthetic construct
  REGION 1..978: note = engineered CasX variant
QEIKRINKIRRRLVKDSNTKKAGKTGPMKTLLVRVMTPDLRERLENLRKKPENIPQPISNTSRANLNKLLTDYTEMKKAILHVYWEEFQKDPVGLMSRVAQPASKKIDQNKLKPEMDEKGNLTTAGFACSQCGQPLFVYKLEQVSEKGKAYTNYFGRCNVAEHEKLIQLAQLKPEKDSDEAVTYSLGKFGQRALDFYSIHVTKESTHPVKPLAQIAGNRYASGPVGKALRDACMGTIASFLSKYQDIIIEHQKVVKGNQKRLESLRELAGKENLEYPSVTLPPQPHTKEGVDAYNEVIARVRMWVNLNLWQKLKLSRDDAKPLLRLKGFPSFPLVERQANEVDWWDMVCNVKKLINEKKEDGKVFWQNLAGYKRQEALRPYLSSEEDRKKGKKFARTQLGDLLLHLEKKHGEDWGKVYDEAWERIDKKVEGLSKHIKLEEERRSEDAQSKAALTDWLRAKASFVIEGLKEADKDEFCRCELKLQKWYGDLRGKPFAIEAENSILDISGFSKQYNCAFIWQKDGVKKLNLYLIINYFKGGKLRFKKIKPEAFEANRFYTVINKKSGEIVPMEVNFNFDDPNLIILPLAFGKRQGREFIWNDLLSLETGSLKLANGRVIEKTLYNRRTRQDEPALFVALTFERREVLDSSNIKPMNLIGVDRGENIPAVIALTDPEGCPLSRFKDSLGNPTHILRIGESYKEKQRTIQAKKEVEQRRAGGYSRKYASKAKNLADDMVRNTARDLLYYAVTQDAMLIFENLSRGFGRQGKRTFMAERQYTRMEDWLTAKLAYEGLPSKTYLSKTLAQYTSKTCSNCGFTITSADYDRVLEKLKKTATGWMTTINGKELKVEGQITYYNRYKRQNVVKDLSVELDRLSEESVNNDISSWTKGRSGEALSLLKKRFSHRPVQEKFVCLNCGFETHADEQAALNIARSWLFLRSQEYKKYQTNKTTGNTDKRAFVETWQSFYRKKLKEVWKPAV

SEQ ID NO: 49122 - protein, 978 aa, synthetic construct
  REGION 1..978: note = engineered CasX variant
QEIKRINKIRRRLVKDSNTKKAGKTGPMKTLLVRVMTPDLRERLENLRKKPENIPQPISNTSRANLNKLLTDYTEMKKAILHVYWEEFQKDPVGLMSRVAQPASKKIDQNKLKPEMDEKGNLTTAGFACSQCGQPLFVYKLEQVSEKGKAYTNYFGRCNVAEHEKLILLAQLKPEKDSDEAVTYSLGKFGQRALDFYSIHVTKESTHPVKPLAQIAGNRYASGPVGKALRDACMGTIASFLSKYQDIIIEHQKVVKGNQKRLESLRELAGKENLEYPSVTLPPQPHTKEGVDAYNEVIARVRMWVNLNLWQKLKLSRDDAKPLLRLKGFPSFPLVERQANEVDWWDMVCNVKKLINEKKEDGKVFWQNLAIYKRQEALRPYLSSEEDRKKGKKFARTQLGDLLLHLEKKHGEDWGKVYDEAWERIDKKVEGLSKHIKLEEERRSEDAQSKAALTDWLRAKASFVIEGLKEADKDEFCRCELKLQKWYGDLRGKPFAIEAENSILDISGFSKQYNCAFIWQKDGVKKLNLYLIINYFKGGKLRFKKIKPEAFEANRFYTVINKKSGEIVPMEVNFNFDDPNLIILPLAFGKRQGREFIWNDLLSLETGSLKLANGRVIEKTLYNRRTRQDEPALFVALTFERREVLDSSNIKPMNLIGVDRGENIPAVIALTDPEGCPLSRFKDSLGNPTHILRIGESYKEKQRTIQAKKEVEQRRAGGYSRKYASKAKNLADDMVRNTARDLLYYAVTQDAMLIFENLSRGFGRQGKRTFMAERQYTRMEDWLTAKLAYEGLPSKTYLSKTLAQYTSKTCSNCGFTITSADYDRVLEKLKKTATGWMTTINGKELKVEGQITYYNRYKRQNVVKDLSVELDRLSEESVNNDISSWTKGRSGEALSLLKKRFSHRPVQEKFVCLNCGFETHADEQAALNIARSWLFLRSQEYKKYQTNKTTGNTDKRAFVETWQSFYRKKLKEVWKPAV

SEQ ID NO: 49123 - protein, 978 aa, synthetic construct
  REGION 1..978: note = engineered CasX variant
QEIKRINKIRRRLVKDSNTKKAGKTGPMKTLLVRVMTPDLRERLENLRKKPENIPQPISNTSRANLNKLLTDYTEMKKAILHVYWEEFQKDPVGLMSRVAQPASKKIDQNKLKPEMDEKGNLTTAGFACSQCGQPLFVYKLEQVSEKGKAYTNYFGRCNVAEHEKLILLAQLKPEKDSDEAVTYSLGKFGQRALDFYSIHVTKESTHPVKPLAQIAGNRYASGPVGKALRDACMGTIASFLSKYQDIIIEHQKVVKGNQKRLESLRELAGKENLEYPSVTLPPQPHTKEGVDAYNEVIARVRMWVNLNLWQKLKLSRDDAKPLLRLKGFPSFPLVERQANEVDWWDMVCNVKKLINEKKEDGKVFWQNLAGYKRQEALRPYLSSEEDREKGKKFARTQLGDLLLHLEKKHGEDWGKVYDEAWERIDKKVEGLSKHIKLEEERRSEDAQSKAALTDWLRAKASFVIEGLKEADKDEFCRCELKLQKWYGDLRGKPFAIEAENSILDISGFSKQYNCAFIWQKDGVKKLNLYLIINYFKGGKLRFKKIKPEAFEANRFYTVINKKSGEIVPMEVNFNFDDPNLIILPLAFGKRQGREFIWNDLLSLETGSLKLANGRVIEKTLYNRRTRQDEPALFVALTFERREVLDSSNIKPMNLIGVDRGENIPAVIALTDPEGCPLSRFKDSLGNPTHILRIGESYKEKQRTIQAKKEVEQRRAGGYSRKYASKAKNLADDMVRNTARDLLYYAVTQDAMLIFENLSRGFGRQGKRTFMAERQYTRMEDWLTAKLAYEGLPSKTYLSKTLAQYTSKTCSNCGFTITSADYDRVLEKLKKTATGWMTTINGKELKVEGQITYYNRYKRQNVVKDLSVELDRLSEESVNNDISSWTKGRSGEALSLLKKRFSHRPVQEKFVCLNCGFETHADEQAALNIARSWLFLRSQEYKKYQTNKTTGNTDKRAFVETWQSFYRKKLKEVWKPAV

SEQ ID NO: 49124 - protein, 978 aa, synthetic construct
  REGION 1..978: note = engineered CasX variant
QEIKRINKIRRRLVKDSNTKKAGKTGPMKTLLVRVMTPDLRERLENLRKKPENIPQPISNTSRANLNKLLTDYTEMKKAILHVYWEEFQKDPVGLMSRVAQPASKKIDQNKLKPEMDEKGNLTTAGFACSQCGQPLFVYKLEQVSEKGKAYTNYFGRCNVAEHEKLILLAQLKPEKDSDEAVTYSLGKFGQRALDFYSIHVTKESTHPVKPLAQIAGNRYASGPVGKALRDACMGTIASFLSKYQDIIIEHQKVVKGNQKRLESLRELAGKENLEYPSVTLPPQPHTKEGVDAYNEVIARVRMWVNLNLWQKLKLSRDDAKPLLRLKGFPSFPLVERQANEVDWWDMVCNVKKLINEKKEDGKVFWQNLAGYKRQEALRPYLSSEEDRKKGKKFARTQLGDLLLHLEKKHGEDWGKVYDEAWERIDKKVEGLSKHIKLEEERRSEDAQSKAALTDWLRAKASFVIEGLKEADKDEFCRCELKLQKWYGDLRGKPFAIEAENSILDISGFSKQYNCAFIWQKDGVKKLNLYLIINYFKGGKLRFKKIKPEAFEANRFYTVINKKSGEIVIMEVNFNFDDPNLIILPLAFGKRQGREFIWNDLLSLETGSLKLANGRVIEKTLYNRRTRQDEPALFVALTFERREVLDSSNIKPMNLIGVDRGENIPAVIALTDPEGCPLSRFKDSLGNPTHILRIGESYKEKQRTIQAKKEVEQRRAGGYSRKYASKAKNLADDMVRNTARDLLYYAVTQDAMLIFENLSRGFGRQGKRTFMAERQYTRMEDWLTAKLAYEGLPSKTYLSKTLAQYTSKTCSNCGFTITSADYDRVLEKLKKTATGWMTTINGKELKVEGQITYYNRYKRQNVVKDLSVELDRLSEESVNNDISSWTKGRSGEALSLLKKRFSHRPVQEKFVCLNCGFETHADEQAALNIARSWLFLRSQEYKKYQTNKTTGNTDKRAFVETWQSFYRKKLKEVWKPAV

SEQ ID NO: 49125 - protein, 979 aa, synthetic construct
  REGION 1..979: note = engineered CasX variant
QEIKRINKIRRRLVKDSNTKKAGKTGPMKTLLVRVMTPDLRERLENLRKKPENIPQPISNTSRANLNKLLTDYTEMKKAILHVYWEEFQKDPVGLMSRVAQPASKKIDQNKLKPEMDEKGNLTTAGFACSQCGQPLFVYKLEQVSEKGKAYTNYFGRCNVAEHEKLILLAQLKPEKDSDEAVTYSLGKFGQRALDFYSIHVTKESTHPVKPLAQIAGNRYASGPVGKALRGACMGTIASFLSKYQDIIIEHQKVVKGNQKRLESLRELAGKENLEYPSVTLPPQPHTKEGVDAYNEVIARVRMWVNLNLWQKLKLSRDDAKPLLRLKGFPSFPLVERQANEVDWWDMVCNVKKLINEKKEDGKVFWQNLAGYKRQEALRPYLSSEEDRKKGKKFARYQLGDLLLHLEKKHEGEDWGKVYDEAWERIDKKVEGLSKHIKLEEERRSEDAQSKAALTDWLRAKASFVIEGLKEADKDEFCRCELKLQKWYGDLRGKPFAIEAENSILDISGFSKQYNCAFIWQKDGVKKLNLYLIINYFKGGKLRFKKIKPEAFEANRFYTVINKKSGEIVPMEVNFNFDDPNLIILPLAFGKRQGREFIWNDLLSLETGSLKLANGRVIEKTLYNRRTRQDEPALFVALTFERREVLDSSNIKPMNLIGVDRGENIPAVIALTDPEGCPLSRFKDSLGNPTHILRIGESYKEKQRTIQAKKEVEQRRAGGYSRKYASKAKNLADDMVRNTARDLLYYAVTQDAMLIFENLSRGFGRQGKRTFMAERQYTRMEDWLTAKLAYEGLPSKTYLSKTLAQYTSKTCSNCGFTITSADYDRVLEKLKKTATGWMTTINGKELKVEGQITYYNRYKRQNVVKDLSVELDRLSEESVNNDISSWTKGRSGEALSLLKKRFSHRPVQEKFVCLNCGFETHADEQAALNIARSWLFLRSQEYKKYQTNKTTGNTDKRAFVETWQSFYRKKLKEVWKPAV

SEQ ID NO: 49126 - protein, 979 aa, synthetic construct
  REGION 1..979: note = engineered CasX variant
QEIKRINKIRRRLVKDSNTKKAGKTGPMKTLLVRVMTPDLRERLENLRKKPENIPQPISNTSRANLNKLLTDYTEMKKAILHVYWEEFQKDPVGLMSRVAQPASKKIDQNKLKPEMDEKGNLTTAGFACSQCGQPLFVYKLEQVSEKGKAYTNYFGRCNVAEHEKLILLAQLKPEKDSDEAVTYSLGKFGQRALDFYSIHVTKESTHPVKPLAQIAGNRYASGPVGKALRDACMGTIASFLSKYQDIIIEHQKVVKGNQKRLESLRELAGKENLEYPSVTLPPQPHTKEGVDAYNEVIARVRMWVNLNLWQKLKLSRDDAKPLLRLKNFPSFPLVERQANEVDWWDMVCNVKKLINEKKEDGKVFWQNLAGYKRQEALRPYLSSEEDRKKGKKFARYQLGDLLLHLEKKHEGEDWGKVYDEAWERIDKKVEGLSKHIKLEEERRSEDAQSKAALTDWLRAKASFVIEGLKEADKDEFCRCELKLQKWYGDLRGKPFAIEAENSILDISGFSKQYNCAFIWQKDGVKKLNLYLIINYFKGGKLRFKKIKPEAFEANRFYTVINKKSGEIVPMEVNFNFDDPNLIILPLAFGKRQGREFIWNDLLSLETGSLKLANGRVIEKTLYNRRTRQDEPALFVALTFERREVLDSSNIKPMNLIGVDRGENIPAVIALTDPEGCPLSRFKDSLGNPTHILRIGESYKEKQRTIQAKKEVEQRRAGGYSRKYASKAKNLADDMVRNTARDLLYYAVTQDAMLIFENLSRGFGRQGKRTFMAERQYTRMEDWLTAKLAYEGLPSKTYLSKTLAQYTSKTCSNCGFTITSADYDRVLEKLKKTATGWMTTINGKELKVEGQITYYNRYKRQNVVKDLSVELDRLSEESVNNDISSWTKGRSGEALSLLKKRFSHRPVQEKFVCLNCGFETHADEQAALNIARSWLFLRSQEYKKYQTNKTTGNTDKRAFVETWQSFYRKKLKEVWKPAV

SEQ ID NO: 49127 - protein, 979 aa, synthetic construct
  REGION 1..979: note = engineered CasX variant
QEIKRINKIRRRLVKDSNTKKAGKTGPMKTLLVRVMTPDLRERLENLRKKPENIPQPISNTSRANLNKLLTDYTEMKKAILHVYWEEFQKDPVGLMSRVAQPASKKIDQNKLKPEMDEKGNLTTAGFACSQCGQPLFVYKLEQVSEKGKAYTNYFGRCNVAEHEKLILLAQLKPEKDSDEAVTYSLGKFGQRALDFYSIHVTKESTHPVKPLAQIAGNRYASGPVGKALRDACMGTIASFLSKYQDIIIEHQKVVKGNQKRLESLRELAGKENLEYPSVTLPPQPHTKEGVDAYNEVIARVRMWVNLNLWQKLKLSRDDAKPLLRLKGFPSFPLVERQANEVDWWDMVCNVKKLINEKKEDGKVFWQNLAGYKRQEALRPYLSSEEDRKKGKKFARYQLGDLLNHLEKKHEGEDWGKVYDEAWERIDKKVEGLSKHIKLEEERRSEDAQSKAALTDWLRAKASFVIEGLKEADKDEFCRCELKLQKWYGDLRGKPFAIEAENSILDISGFSKQYNCAFIWQKDGVKKLNLYLIINYFKGGKLRFKKIKPEAFEANRFYTVINKKSGEIVPMEVNFNFDDPNLIILPLAFGKRQGREFIWNDLLSLETGSLKLANGRVIEKTLYNRRTRQDEPALFVALTFERREVLDSSNIKPMNLIGVDRGENIPAVIALTDPEGCPLSRFKDSLGNPTHILRIGESYKEKQRTIQAKKEVEQRRAGGYSRKYASKAKNLADDMVRNTARDLLYYAVTQDAMLIFENLSRGFGRQGKRTFMAERQYTRMEDWLTAKLAYEGLPSKTYLSKTLAQYTSKTCSNCGFTITSADYDRVLEKLKKTATGWMTTINGKELKVEGQITYYNRYKRQNVVKDLSVELDRLSEESVNNDISSWTKGRSGEALSLLKKRFSHRPVQEKFVCLNCGFETHADEQAALNIARSWLFLRSQEYKKYQTNKTTGNTDKRAFVETWQSFYRKKLKEVWKPAV

SEQ ID NO: 49128 - protein, 979 aa, synthetic construct
  REGION 1..979: note = engineered CasX variant
QEIKRINKIRRRLVKDSNTKKAGKTGPMKTLLVRVMTPDLRERLENLRKKPENIPQPISNTSRANLNKLLTDYTEMKKAILHVYWEEFQKDPVGLMSRVAQPASKKIDQNKLKPEMDEKGNLTTAGFACSQCGQPLFVYKLEQVSEKGKAYTNYFGRCNVAEHEKLILLAQLKPEKDSDEAVTYSLGKFGQRALDFYSIHVTKESTHPVKPLAQIAGNRYASGPVGKALRDACMGTIASFLSKYQDIIIEHQKVVKGNQKRLESLRELAGKENLEYPSVTLPPQPHTKEGVDAYNEVIARVRMWVNLNLWQKLKLSRDDAKPLLRLKGFPSFPLVERQANEVDWWDMVCNVKKLINEKKEDGKVFWQNLAGYKRQEALRPYLSSEEDRKKGKKFARYQLGDLLWHLEKKHEGEDWGKVYDEAWERIDKKVEGLSKHIKLEEERRSEDAQSKAALTDWLRAKASFVIEGLKEADKDEFCRCELKLQKWYGDLRGKPFAIEAENSILDISGFSKQYNCAFIWQKDGVKKLNLYLIINYFKGGKLRFKKIKPEAFEANRFYTVINKKSGEIVPMEVNFNFDDPNLIILPLAFGKRQGREFIWNDLLSLETGSLKLANGRVIEKTLYNRRTRQDEPALFVALTFERREVLDSSNIKPMNLIGVDRGENIPAVIALTDPEGCPLSRFKDSLGNPTHILRIGESYKEKQRTIQAKKEVEQRRAGGYSRKYASKAKNLADDMVRNTARDLLYYAVTQDAMLIFENLSRGFGRQGKRTFMAERQYTRMEDWLTAKLAYEGLPSKTYLSKTLAQYTSKTCSNCGFTITSADYDRVLEKLKKTATGWMTTINGKELKVEGQITYYNRYKRQNVVKDLSVELDRLSEESVNNDISSWTKGRSGEALSLLKKRFSHRPVQEKFVCLNCGFETHADEQAALNIARSWLFLRSQEYKKYQTNKTTGNTDKRAFVETWQSFYRKKLKEVWKPAV

SEQ ID NO: 49129 - protein, 979 aa, synthetic construct
  REGION 1..979: note = engineered CasX variant
QEIKRINKIRRRLVKDSNTKKAGKTGPMKTLLVRVMTPDLRERLENLRKKPENIPQPISNTSRANLNKLLTDYTEMKKAILHVYWEEFQKDPVGLMSRVAQPASKKIDQNKLKPEMDEKGNLTTAGFACSQCGQPLFVYKLEQVSEKGKAYTNYFGRCNVAEHEKLILLAQLKPEKDSDEAVTYSLGKFGQRALDFYSIHVTKESTHPVKPLAQIAGNRYASGPVGKALRDACMGTIASFLSKYQDIIIEHQKVVKGNQKRLESLRELAGKENLEYPSVTLPPQPHTKEGVDAYNEVIARVRMWVNLNLWQKLKLSRDDAKPLLRLKGFPSFPLVERQANEVDWWDMVCNVKKLINEKKEDGKVFWQNLAGYKRQEALRPYLSSEEDRKKGKKFARYQLGDLLLHLYKKHEGEDWGKVYDEAWERIDKKVEGLSKHIKLEEERRSEDAQSKAALTDWLRAKASFVIEGLKEADKDEFCRCELKLQKWYGDLRGKPFAIEAENSILDISGFSKQYNCAFIWQKDGVKKLNLYLIINYFKGGKLRFKKIKPEAFEANRFYTVINKKSGEIVPMEVNFNFDDPNLIILPLAFGKRQGREFIWNDLLSLETGSLKLANGRVIEKTLYNRRTRQDEPALFVALTFERREVLDSSNIKPMNLIGVDRGENIPAVIALTDPEGCPLSRFKDSLGNPTHILRIGESYKEKQRTIQAKKEVEQRRAGGYSRKYASKAKNLADDMVRNTARDLLYYAVTQDAMLIFENLSRGFGRQGKRTFMAERQYTRMEDWLTAKLAYEGLPSKTYLSKTLAQYTSKTCSNCGFTITSADYDRVLEKLKKTATGWMTTINGKELKVEGQITYYNRYKRQNVVKDLSVELDRLSEESVNNDISSWTKGRSGEALSLLKKRFSHRPVQEKFVCLNCGFETHADEQAALNIARSWLFLRSQEYKKYQTNKTTGNTDKRAFVETWQSFYRKKLKEVWKPAV

SEQ ID NO: 49130 - protein, 979 aa, synthetic construct
  REGION 1..979: note = engineered CasX variant
QEIKRINKIRRRLVKDSNTKKAGKTGPMKTLLVRVMTPDLRERLENLRKKPENIPQPISNTSRANLNKLLTDYTEMKKAILHVYWEEFQKDPVGLMSRVAQPASKKIDQNKLKPEMDEKGNLTTAGFACSQCGQPLFVYKLEQVSEKGKAYTNYFGRCNVAEHEKLILLAQLKPEKDSDEAVTYSLGKFGQRALDFYSIHVTKESTHPVKPLAQIAGNRYASGPVGKALRDACMGTIASFLSKYQDIIIEHQKVVKGNQKRLESLRELAGKENLEYPSVTLPPQPHTKEGVDAYNEVIARVRMWVNLNLWQKLKLSRDDAKPLLRLKGFPSFPLVERQANEVDWWDMVCNVKKLINEKKEDGKVFWQNLAGYKRQEALRPYLSSEEDRKKGKKFARYQLGDLLLHLEKKHEPEDWGKVYDEAWERIDKKVEGLSKHIKLEEERRSEDAQSKAALTDWLRAKASFVIEGLKEADKDEFCRCELKLQKWYGDLRGKPFAIEAENSILDISGFSKQYNCAFIWQKDGVKKLNLYLIINYFKGGKLRFKKIKPEAFEANRFYTVINKKSGEIVPMEVNFNFDDPNLIILPLAFGKRQGREFIWNDLLSLETGSLKLANGRVIEKTLYNRRTRQDEPALFVALTFERREVLDSSNIKPMNLIGVDRGENIPAVIALTDPEGCPLSRFKDSLGNPTHILRIGESYKEKQRTIQAKKEVEQRRAGGYSRKYASKAKNLADDMVRNTARDLLYYAVTQDAMLIFENLSRGFGRQGKRTFMAERQYTRMEDWLTAKLAYEGLPSKTYLSKTLAQYTSKTCSNCGFTITSADYDRVLEKLKKTATGWMTTINGKELKVEGQITYYNRYKRQNVVKDLSVELDRLSEESVNNDISSWTKGRSGEALSLLKKRFSHRPVQEKFVCLNCGFETHADEQAALNIARSWLFLRSQEYKKYQTNKTTGNTDKRAFVETWQSFYRKKLKEVWKPAV

SEQ ID NO: 49131 - protein, 980 aa, synthetic construct
  REGION 1..980: note = engineered CasX variant
QEIKRINKIRRRLVKDSNTKKAGKTGPMKTLLVRVMTPDLRERLENLRKKPENIPQPISNTSRANLNKLLTDYTEMKKAILHVYWEEFQKDPVGLMSRVAQPASKKIDQNKLKPEMDEKGNLTTAGFACSQCGQPLFVYKLEQVSEKGKAYTNYFGRCNVAEHEKLILLAQLKPEKDSDEAVTYSLGKFGQRALDFYSIHVTKESTHPVKPLAQIAGNRYASGPVGKALRDACMGTIASFLSKYQDIIIEHQKVVKGNQKRLESLRELAGKENLEYPSVTLPPQPHTKEGVDAYNEVIARVRMWVNLNLWQKLKLSRDDAKPLLRLKGFPSFPLVERQANEVDWWDMVCNVKKLINEKKEDGKVFWQNLAGYKRQEALRPYLSSEEDRKKGKKFARYQLGDLLLHLEKKHEGERDWGKVYDEAWERIDKKVEGLSKHIKLEEERRSEDAQSKAALTDWLRAKASFVIEGLKEADKDEFCRCELKLQKWYGDLRGKPFAIEAENSILDISGFSKQYNCAFIWQKDGVKKLNLYLIINYFKGGKLRFKKIKPEAFEANRFYTVINKKSGEIVPMEVNFNFDDPNLIILPLAFGKRQGREFIWNDLLSLETGSLKLANGRVIEKTLYNRRTRQDEPALFVALTFERREVLDSSNIKPMNLIGVDRGENIPAVIALTDPEGCPLSRFKDSLGNPTHILRIGESYKEKQRTIQAKKEVEQRRAGGYSRKYASKAKNLADDMVRNTARDLLYYAVTQDAMLIFENLSRGFGRQGKRTFMAERQYTRMEDWLTAKLAYEGLPSKTYLSKTLAQYTSKTCSNCGFTITSADYDRVLEKLKKTATGWMTTINGKELKVEGQITYYNRYKRQNVVKDLSVELDRLSEESVNNDISSWTKGRSGEALSLLKKRFSHRPVQEKFVCLNCGFETHADEQAALNIARSWLFLRSQEYKKYQTNKTTGNTDKRAFVETWQSFYRKKLKEVWKPAV

SEQ ID NO: 49132 - protein, 980 aa, synthetic construct
  REGION 1..980: note = engineered CasX variant
QEIKRINKIRRRLVKDSNTKKAGKTGPMKTLLVRVMTPDLRERLENLRKKPENIPQPISNTSRANLNKLLTDYTEMKKAILHVYWEEFQKDPVGLMSRVAQPASKKIDQNKLKPEMDEKGNLTTAGFACSQCGQPLFVYKLEQVSEKGKAYTNYFGRCNVAEHEKLILLAQLKPEKDSDEAVTYSLGKFGQRALDFYSIHVTKESTHPVKPLAQIAGNRYASGPVGKALRDACMGTIASFLSKYQDIIIEHQKVVKGNQKRLESLRELAGKENLEYPSVTLPPQPHTKEGVDAYNEVIARVRMWVNLNLWQKLKLSRDDAKPLLRLKGFPSFPLVERQANEVDWWDMVCNVKKLINEKKEDGKVFWQNLAGYKRQEALRPYLSSEEDRKKGKKFARYQLGDLLLHLEKKHEGEYDWGKVYDEAWERIDKKVEGLSKHIKLEEERRSEDAQSKAALTDWLRAKASFVIEGLKEADKDEFCRCELKLQKWYGDLRGKPFAIEAENSILDISGFSKQYNCAFIWQKDGVKKLNLYLIINYFKGGKLRFKKIKPEAFEANRFYTVINKKSGEIVPMEVNFNFDDPNLIILPLAFGKRQGREFIWNDLLSLETGSLKLANGRVIEKTLYNRRTRQDEPALFVALTFERREVLDSSNIKPMNLIGVDRGENIPAVIALTDPEGCPLSRFKDSLGNPTHILRIGESYKEKQRTIQAKKEVEQRRAGGYSRKYASKAKNLADDMVRNTARDLLYYAVTQDAMLIFENLSRGFGRQGKRTFMAERQYTRMEDWLTAKLAYEGLPSKTYLSKTLAQYTSKTCSNCGFTITSADYDRVLEKLKKTATGWMTTINGKELKVEGQITYYNRYKRQNVVKDLSVELDRLSEESVNNDISSWTKGRSGEALSLLKKRFSHRPVQEKFVCLNCGFETHADEQAALNIARSWLFLRSQEYKKYQTNKTTGNTDKRAFVETWQSFYRKKLKEVWKPAV

SEQ ID NO: 49133 - protein, 979 aa, synthetic construct
  REGION 1..979: note = engineered CasX variant
QEIKRINKIRRRLVKDSNTKKAGKTGPMKTLLVRVMTPDLRERLENLRKKPENIPQPISNTSRANLNKLLTDYTEMKKAILHVYWEEFQKDPVGLMSRVAQPASKKIDQNKLKPEMDEKGNLTTAGFACSQCGQPLFVYKLEQVSEKGKAYTNYFGRCNVAEHEKLILLAQLKPEKDSDEAVTYSLGKFGQRALDFYSIHVTKESTHPVKPLAQIAGNRYASGPVGKALRDACMGTIASFLSKYQDIIIEHQKVVKGNQKRLESLRELAGKENLEYPSVTLPPQPHTKEGVDAYNEVIARVRMWVNLNLWQKLKLSRDDAKPLLRLKGFPSFPLVERQANEVDWWDMVCNVKKLINEKKEDGKVFWQNLAGYKRQEALRPYLSSEEDRKKGKKFARYQLGDLLLHLEKKHEGEDWGDVYDEAWERIDKKVEGLSKHIKLEEERRSEDAQSKAALTDWLRAKASFVIEGLKEADKDEFCRCELKLQKWYGDLRGKPFAIEAENSILDISGFSKQYNCAFIWQKDGVKKLNLYLIINYFKGGKLRFKKIKPEAFEANRFYTVINKKSGEIVPMEVNFNFDDPNLIILPLAFGKRQGREFIWNDLLSLETGSLKLANGRVIEKTLYNRRTRQDEPALFVALTFERREVLDSSNIKPMNLIGVDRGENIPAVIALTDPEGCPLSRFKDSLGNPTHILRIGESYKEKQRTIQAKKEVEQRRAGGYSRKYASKAKNLADDMVRNTARDLLYYAVTQDAMLIFENLSRGFGRQGKRTFMAERQYTRMEDWLTAKLAYEGLPSKTYLSKTLAQYTSKTCSNCGFTITSADYDRVLEKLKKTATGWMTTINGKELKVEGQITYYNRYKRQNVVKDLSVELDRLSEESVNNDISSWTKGRSGEALSLLKKRFSHRPVQEKFVCLNCGFETHADEQAALNIARSWLFLRSQEYKKYQTNKTTGNTDKRAFVETWQSFYRKKLKEVWKPAV

SEQ ID NO: 49134 - protein, 979 aa, synthetic construct
  REGION 1..979: note = engineered CasX variant
QEIKRINKIRRRLVKDSNTKKAGKTGPMKTLLVRVMTPDLRERLENLRKKPENIPQPISNTSRANLNKLLTDYTEMKKAILHVYWEEFQKDPVGLMSRVAQPASKKIDQNKLKPEMDEKGNLTTAGFACSQCGQPLFVYKLEQVSEKGKAYTNYFGRCNVAEHEKLILLAQLKPEKDSDEAVTYSLGKFGQRALDFYSIHVTKESTHPVKPLAQIAGNRYASGPVGKALRDACMGTIASFLSKYQDIIIEHQKVVKGNQKRLESLRELAGKENLEYPSVTLPPQPHTKEGVDAYNEVIARVRMWVNLNLWQKLKLSRDDAKPLLRLKGFPSFPLVERQANEVDWWDMVCNVKKLINEKKEDGKVFWQNLAGYKRQEALRPYLSSEEDRKKGKKFARYQLGDLLLHLEKKHEGEDWGKVYGEAWERIDKKVEGLSKHIKLEEERRSEDAQSKAALTDWLRAKASFVIEGLKEADKDEFCRCELKLQKWYGDLRGKPFAIEAENSILDISGFSKQYNCAFIWQKDGVKKLNLYLIINYFKGGKLRFKKIKPEAFEANRFYTVINKKSGEIVPMEVNFNFDDPNLIILPLAFGKRQGREFIWNDLLSLETGSLKLANGRVIEKTLYNRRTRQDEPALFVALTFERREVLDSSNIKPMNLIGVDRGENIPAVIALTDPEGCPLSRFKDSLGNPTHILRIGESYKEKQRTIQAKKEVEQRRAGGYSRKYASKAKNLADDMVRNTARDLLYYAVTQDAMLIFENLSRGFGRQGKRTFMAERQYTRMEDWLTAKLAYEGLPSKTYLSKTLAQYTSKTCSNCGFTITSADYDRVLEKLKKTATGWMTTINGKELKVEGQITYYNRYKRQNVVKDLSVELDRLSEESVNNDISSWTKGRSGEALSLLKKRFSHRPVQEKFVCLNCGFETHADEQAALNIARSWLFLRSQEYKKYQTNKTTGNTDKRAFVETWQSFYRKKLKEVWKPAV

SEQ ID NO: 49135 - protein, 979 aa, synthetic construct
  REGION 1..979: note = engineered CasX variant
QEIKRINKIRRRLVKDSNTKKAGKTGPMKTLLVRVMTPDLRERLENLRKKPENIPQPISNTSRANLNKLLTDYTEMKKAILHVYWEEFQKDPVGLMSRVAQPASKKIDQNKLKPEMDEKGNLTTAGFACSQCGQPLFVYKLEQVSEKGKAYTNYFGRCNVAEHEKLILLAQLKPEKDSDEAVTYSLGKFGQRALDFYSIHVTKESTHPVKPLAQIAGNRYASGPVGKALRDACMGTIASFLSKYQDIIIEHQKVVKGNQKRLESLRELAGKENLEYPSVTLPPQPHTKEGVDAYNEVIARVRMWVNLNLWQKLKLSRDDAKPLLRLKGFPSFPLVERQANEVDWWDMVCNVKKLINEKKEDGKVFWQNLAGYKRQEALRPYLSSEEDRKKGKKFARYQLGDLLLHLEKKHEGEDWGKVYDEAWERIDKKVEGLSKHIKLEEERRSEDAQSKAALTDWLRAKASFVIEGKKEADKDEFCRCELKLQKWYGDLRGKPFAIEAENSILDISGFSKQYNCAFIWQKDGVKKLNLYLIINYFKGGKLRFKKIKPEAFEANRFYTVINKKSGEIVPMEVNFNFDDPNLIILPLAFGKRQGREFIWNDLLSLETGSLKLANGRVIEKTLYNRRTRQDEPALFVALTFERREVLDSSNIKPMNLIGVDRGENIPAVIALTDPEGCPLSRFKDSLGNPTHILRIGESYKEKQRTIQAKKEVEQRRAGGYSRKYASKAKNLADDMVRNTARDLLYYAVTQDAMLIFENLSRGFGRQGKRTFMAERQYTRMEDWLTAKLAYEGLPSKTYLSKTLAQYTSKTCSNCGFTITSADYDRVLEKLKKTATGWMTTINGKELKVEGQITYYNRYKRQNVVKDLSVELDRLSEESVNNDISSWTKGRSGEALSLLKKRFSHRPVQEKFVCLNCGFETHADEQAALNIARSWLFLRSQEYKKYQTNKTTGNTDKRAFVETWQSFYRKKLKEVWKPAV

SEQ ID NO: 49136 - protein, 979 aa, synthetic construct
  REGION 1..979: note = engineered CasX variant
QEIKRINKIRRRLVKDSNTKKAGKTGPMKTLLVRVMTPDLRERLENLRKKPENIPQPISNTSRANLNKLLTDYTEMKKAILHVYWEEFQKDPVGLMSRVAQPASKKIDQNKLKPEMDEKGNLTTAGFACSQCGQPLFVYKLEQVSEKGKAYTNYFGRCNVAEHEKLILLAQLKPEKDSDEAVTYSLGKFGQRALDFYSIHVTKESTHPVKPLAQIAGNRYASGPVGKALRDACMGTIASFLSKYQDIIIEHQKVVKGNQKRLESLRELAGKENLEYPSVTLPPQPHTKEGVDAYNEVIARVRMWVNLNLWQKLKLSRDDAKPLLRLKGFPSFPLVERQANEVDWWDMVCNVKKLINEKKEDGKVFWQNLAGYKRQEALRPYLSSEEDRKKGKKFARYQLGDLLLHLEKKHEGEDWGKVYDEAWERIDKKVEGLSKHIKLEEERRSEDAQSKAALTDWLRAKASFVIEGSKEADKDEFCRCELKLQKWYGDLRGKPFAIEAENSILDISGFSKQYNCAFIWQKDGVKKLNLYLIINYFKGGKLRFKKIKPEAFEANRFYTVINKKSGEIVPMEVNFNFDDPNLIILPLAFGKRQGREFIWNDLLSLETGSLKLANGRVIEKTLYNRRTRQDEPALFVALTFERREVLDSSNIKPMNLIGVDRGENIPAVIALTDPEGCPLSRFKDSLGNPTHILRIGESYKEKQRTIQAKKEVEQRRAGGYSRKYASKAKNLADDMVRNTARDLLYYAVTQDAMLIFENLSRGFGRQGKRTFMAERQYTRMEDWLTAKLAYEGLPSKTYLSKTLAQYTSKTCSNCGFTITSADYDRVLEKLKKTATGWMTTINGKELKVEGQITYYNRYKRQNVVKDLSVELDRLSEESVNNDISSWTKGRSGEALSLLKKRFSHRPVQEKFVCLNCGFETHADEQAALNIARSWLFLRSQEYKKYQTNKTTGNTDKRAFVETWQSFYRKKLKEVWKPAV

SEQ ID NO: 49137 - protein, 980 aa, synthetic construct
  REGION 1..980: note = engineered CasX variant
QEIKRINKIRRRLVKDSNTKKAGKTGPMKTLLVRVMTPDLRERLENLRKKPENIPQPISNTSRANLNKLLTDYTEMKKAILHVYWEEFQKDPVGLMSRVAQPASKKIDQNKLKPEMDEKGNLTTAGFACSQCGQPLFVYKLEQVSEKGKAYTNYFGRCNVAEHEKLILLAQLKPEKDSDEAVTYSLGKFGQRALDFYSIHVTKESTHPVKPLAQIAGNRYASGPVGKALRDACMGTIASFLSKYQDIIIEHQKVVKGNQKRLESLRELAGKENLEYPSVTLPPQPHTKEGVDAYNEVIARVRMWVNLNLWQKLKLSRDDAKPLLRLKGFPSFPLVERQANEVDWWDMVCNVKKLINEKKEDGKVFWQNLAGYKRQEALRPYLSSEEDRKKGKKFARYQLGDLLLHLEKKHEGEDWGKVYDEAWERIDKKVEGLSKHIKLEEERRSEDAQSKAALTDWLRAKASFVIEGLKEADDKDEFCRCELKLQKWYGDLRGKPFAIEAENSILDISGFSKQYNCAFIWQKDGVKKLNLYLIINYFKGGKLRFKKIKPEAFEANRFYTVINKKSGEIVPMEVNFNFDDPNLIILPLAFGKRQGREFIWNDLLSLETGSLKLANGRVIEKTLYNRRTRQDEPALFVALTFERREVLDSSNIKPMNLIGVDRGENIPAVIALTDPEGCPLSRFKDSLGNPTHILRIGESYKEKQRTIQAKKEVEQRRAGGYSRKYASKAKNLADDMVRNTARDLLYYAVTQDAMLIFENLSRGFGRQGKRTFMAERQYTRMEDWLTAKLAYEGLPSKTYLSKTLAQYTSKTCSNCGFTITSADYDRVLEKLKKTATGWMTTINGKELKVEGQITYYNRYKRQNVVKDLSVELDRLSEESVNNDISSWTKGRSGEALSLLKKRFSHRPVQEKFVCLNCGFETHADEQAALNIARSWLFLRSQEYKKYQTNKTTGNTDKRAFVETWQSFYRKKLKEVWKPAV

SEQ ID NO: 49138 - protein, 980 aa, synthetic construct
  REGION 1..980: note = engineered CasX variant
QEIKRINKIRRRLVKDSNTKKAGKTGPMKTLLVRVMTPDLRERLENLRKKPENIPQPISNTSRANLNKLLTDYTEMKKAILHVYWEEFQKDPVGLMSRVAQPASKKIDQNKLKPEMDEKGNLTTAGFACSQCGQPLFVYKLEQVSEKGKAYTNYFGRCNVAEHEKLILLAQLKPEKDSDEAVTYSLGKFGQRALDFYSIHVTKESTHPVKPLAQIAGNRYASGPVGKALRDACMGTIASFLSKYQDIIIEHQKVVKGNQKRLESLRELAGKENLEYPSVTLPPQPHTKEGVDAYNEVIARVRMWVNLNLWQKLKLSRDDAKPLLRLKGFPSFPLVERQANEVDWWDMVCNVKKLINEKKEDGKVFWQNLAGYKRQEALRPYLSSEEDRKKGKKFARYQLGDLLLHLEKKHEGEDWGKVYDEAWERIDKKVEGLSKHIKLEEERRSEDAQSKAALTDWLRAKASFVIEGLKEADKDEFCRCELKLQKWYGDLRGKPFAIEAENSILDISGFSKQYNCAFIWQKDGVKKLNLYLIINYFKGGKLRFKKIKPEAFEANRFYTVINKKSGEIVPMEVNFNFDDPNLIILPLAFGKRQGREFIWNDLLSLETGSLKLANGRVIEKTLYNRRTRQDEPALFVALTFERREVLDSSNIKPMNLIGVDRGENIPAVIALTDPEGCPLSRFKDSLGNPTHILRIGESYKEKQRTIQAKKEVEQRRAGGYSRKYASKAKNLADDMVRNTARDLLYYAVTQDAMLIFENLSRGFGRQGKRTFMAERQYTRMEDWLTAKLAYEGLPSKTYLSKTLAQYTSKTCSNCGFTITSADYDRVLEKLKKTATGWMTTINGKELKVEGQITYYNRYKRQNVVKDLSVELDRLSEESVNNDISSWTKGRSGNEALSLLKKRFSHRPVQEKFVCLNCGFETHADEQAALNIARSWLFLRSQEYKKYQTNKTTGNTDKRAFVETWQSFYRKKLKEVWKPAV

SEQ ID NO: 49139 - protein, 979 aa, synthetic construct
  REGION 1..979: note = engineered CasX variant
QEIKRINKIRRRLVKDSNTKKAGKTGPMKTLLVRVMTPDLRERLENLRKKPENIPQPISNTSRANLNKLLTDYTEMKKAILHVYWEEFQKDPVGLMSRVAQPASKKIDQNKLKPEMDEKGNLTTAGFACSQCGQPLFVYKLEQVSEKGKAYTNYFGRCNVAEHEKLILLAQLKPEKDSDEAVTYSLGKFGQRALDFYSIHVTKESTHPVKPLAQIAGNRYASGPVGKALRDACMGTIASFLSKYQDIIIEHQKVVKGNQKRLESLRELAGKENLEYPSVTLPPQPHTKEGVDAYNEVIARVRMWVNLNLWQKLKLSRDDAKPLLRLKGFPSFPLVERQANEVDWWDMVCNVKKLINEKKEDGKVFWQNLAGYKRQEALRPYLSSEEDRQKGKKFARYQLGDLLLHLEKKHEGEDWGKVYDEAWERIDKKVEGLSKHIKLEEERRSEDAQSKAALTDWLRAKASFVIEGLKEADKDEFCRCELKLQKWYGDLRGKPFAIEAENSILDISGFSKQYNCAFIWQKDGVKKLNLYLIINYFKGGKLRFKKIKPEAFEANRFYTVINKKSGEIVPMEVNFNFDDPNLIILPLAFGKRQGREFIWNDLLSLETGSLKLANGRVIEKTLYNRRTRQDEPALFVALTFERREVLDSSNIKPMNLIGVDRGENIPAVIALTDPEGCPLSRFKDSLGNPTHILRIGESYKEKQRTIQAKKEVEQRRAGGYSRKYASKAKNLADDMVRNTARDLLYYAVTQDAMLIFENLSRGFGRQGKRTFMAERQYTRMEDWLTAKLAYEGLPSKTYLSKTLAQYTSKTCSNCGFTITSADYDRVLEKLKKTATGWMTTINGKELKVEGQITYYNRYKRQNVVKDLSVELDRLSEESVNNDISSWTKGRSGEALSLLKKRFSHRPVQEKFVCLNCGFETHADEQAALNIARSWLFLRSQEYKKYQTNKTTGNTDKRAFVETWQSFYRKKLKEVWKPAV

SEQ ID NO: 49140 - protein, 979 aa, synthetic construct
  REGION 1..979: note = engineered CasX variant
QEIKRINKIRRRLVKDSNTKKAGKTGPMKTLLVRVMTPDLRERLENLRKKPENIPQPISNTSRANLNKLLTDYTEMKKAILHVYWEEFQKDPVGLMSRVAQPASKKIDQNKLKPEMDEKGNLTTAGFACSQCGQPLFVYKLEQVSEKGKAYTNYFGRCNVAEHEKLILLAQLKPEKDSDEAVTYSLGKFGQRALDFYSIHVTKESTHPVKPLAQIAGNRYASGPVGKALRDACMGTIASFLSKYQDIIIEHQKVVKGNQKRLESLRELAGKENLEYPSVTLPPQPHTKEGVDAYNEVIARVRMWVNLNLWQKLKLSRDDAKPLLRLKGFPSFPLVERQANEVDWWDMVCNVKKLINEKKEDGKVFWQNLAGYKRQEALRPYLSSEEDRKKGKKFARYQLGDLLLHLEKKHEGEDWGKVYDEAWERIDKKVEGLSKHIKLEEERRSEDAQSKAALTDWLRAKASFVIEGLKEADKDEFCRCELKLQKWYGDLRGKPFAIEAENSILDISGFSKQYNCAFIWQKDGVKKLNLYLIINYFKGGKLRFKKIKPEAFEANRFYTVINKKSGEIVPMEVNFNFDDPNLIILPLAFGKRQGREFIWNDLLSLETGSLKLANGRVIEKTLYNRRTRQDEPALFVALTFERREVLDSSNIKPMNLIGVDRGENIPAVIALTDPEGCPLSRFKDSLGNPTHILRIGESYKEKQRTIQAKKEVEQRRAGGYSRKYASKAKNLADDMVRNTARDLLYYAVTQDAMLIFENLSRGFGRQGKRTFMAERQYTRMEDWLTAKLAYEGLPSQTYLSKTLAQYTSKTCSNCGFTITSADYDRVLEKLKKTATGWMTTINGKELKVEGQITYYNRYKRQNVVKDLSVELDRLSEESVNNDISSWTKGRSGEALSLLKKRFSHRPVQEKFVCLNCGFETHADEQAALNIARSWLFLRSQEYKKYQTNKTTGNTDKRAFVETWQSFYRKKLKEVWKPAV

SEQ ID NO: 49141 - protein, 979 aa, synthetic construct
  REGION 1..979: note = engineered CasX variant
QEIKRINKIRRRLVKDSNTKKAGKTGPMKTLLVRVMTPDLRERLENLRKKPENIPQPISNTSRANLNKLLTDYTEMKKAILHVYWEEFQKDPVGLMSRVAQPASKKIDQNKLKPEMDEKGNLTTAGFACSQCGQPLFVYKLEQVSEKGKAYTNYFGRCNVAEHEKLILLAQLKPEKDSDEAVTYSLGKFGQRALDFYSIHVTKESTHPVKPLAQIAGNRYASGPVGKALRDACMGTIASFLSKYQDIIIEHQKVVKGNQKRLESLRELAGKENLEYPSVTLPPQPHTKEGVDAYNEVIARVRMWVNLNLWQKLKLSRDDAKPLLRLKGFPSFPLVERQANEVDWWDMVCNVKKLINEKKEDGKVFWQNLAGYKRQEALRPYLSSEEDRKKGKKFARYQLGDLLLHLEKKHEGEDWGKVYDEAWERIDKKVEGLSKHIKLEEERRSEDAQSKAALTDWLRAKASFVIEGLKEADKDEFCRCELKLQKWYGDLRGKPFAIEAENSILDISGFSKQYNCAFIWQKDGVKKLNLYLIINYFKGGKLRFKKIKPEAFEANRFYTVINKKSGEIVPMEVNFNFDDPNLIILPLAFGKRQGREFIWNDLLSLETGSLKLANGRVIEKTLYNRRTRQDEPALFVALTFERREVLDSSNIKPMNLIGVDRGENIPAVIALTDPEGCPLSRFKDSLGNPTHILRIGESYKEKQRTIQAKKEVEQRRAGGYSRKYASKAKNLADDMVRNTARDLLYYAVTQDAMLIFENLSRGFGRQGKRTFMAERQYTRMEDWLTAKLAYNGLPSKTYLSKTLAQYTSKTCSNCGFTITSADYDRVLEKLKKTATGWMTTINGKELKVEGQITYYNRYKRQNVVKDLSVELDRLSEESVNNDISSWTKGRSGEALSLLKKRFSHRPVQEKFVCLNCGFETHADEQAALNIARSWLFLRSQEYKKYQTNKTTGNTDKRAFVETWQSFYRKKLKEVWKPAV

SEQ ID NO: 49142 - protein, 979 aa, synthetic construct
  REGION 1..979: note = engineered CasX variant
QEIKRINKIRRRLVKDSNTKKAGKTGPMKTLLVRVMTPDLRERLENLRKKPENIPQPISNTSRANLNKLLTDYTEMKKAILHVYWEEFQKDPVGLMSRVAQPASKKIDQNKLKPEMDEKGNLTTAGFACSQCGQPLFVYKLEQVSEKGKAYTNYFGRCNVAEHEKLIQLAQLKPEKDSDEAVTYSLGKFGQRALDFYSIHVTKESTHPVKPLAQIAGNRYASGPVGKALRDACMGTIASFLSKYQDIIIEHQKVVKGNQKRLESLRELAGKENLEYPSVTLPPQPHTKEGVDAYNEVIARVRMWVNLNLWQKLKLSRDDAKPLLRLKGFPSFPLVERQANEVDWWDMVCNVKKLINEKKEDGKVFWQNLAGYKRQEALRPYLSSEEDRKKGKKFARYQLGDLLLHLEKKHEGEDWGKVYDEAWERIDKKVEGLSKHIKLEEERRSEDAQSKAALTDWLRAKASFVIEGLKEADKDEFCRCELKLQKWYGDLRGKPFAIEAENSILDISGFSKQYNCAFIWQKDGVKKLNLYLIINYFKGGKLRFKKIKPEAFEANRFYTVINKKSGEIVPMEVNFNFDDPNLIILPLAFGKRQGREFIWNDLLSLETGSLKLANGRVIEKTLYNRRTRQDEPALFVALTFERREVLDSSNIKPMNLIGVDRGENIPAVIALTDPEGCPLSRFKDSLGNPTHILRIGESYKEKQRTIQAKKEVEQRRAGGYSRKYASKAKNLADDMVRNTARDLLYYAVTQDAMLIFENLSRGFGRQGKRTFMAERQYTRMEDWLTAKLAYEGLPSKTYLSKTLAQYTSKTCSNCGFTITSADYDRVLEKLKKTATGWMTTINGKELKVEGQITYYNRYKRQNVVKDLSVELDRLSEESVNNDISSWTKGRSGEALSLLKKRFSHRPVQEKFVCLNCGFETHADEQAALNIARSWLFLRSQEYKKYQTNKTTGNTDKRAFVETWQSFYRKKLKEVWKPAV

SEQ ID NO: 49143 - protein, 979 aa, synthetic construct
  REGION 1..979: note = engineered CasX variant
QEIKRINKIRRRLVKDSNTKKAGKTGPMKTLLVRVMTPDLRERLENLRKKPENIPQPISNTSRANLNKLLTDYTEMKKAILHVYWEEFQKDPVGLMSRVAQPASKKIDQNKLKPEMDEKGNLTTAGFACSQCGQPLFVYKLEQVSEKGKAYTNYFGRCNVAEHEKLILLAQLKPEKDSDEAVTYSLGKFGQRALDFYSIHVTKESTHPVKPLAQIAGNRYASGPVGKALRDACMGTIASFLSKYQDIIIEHQKVVKGNQKRLESLRELAGKENLEYPSVTLPPQPHTKEGVDAYNEVIARVRMWVNLNLWQKLKLSRDDAKPLLRLKGFPSFPLVERQANEVDWWDMVCNVKKLINEKKEDGKVFWQNLAIYKRQEALRPYLSSEEDRKKGKKFARYQLGDLLLHLEKKHEGEDWGKVYDEAWERIDKKVEGLSKHIKLEEERRSEDAQSKAALTDWLRAKASFVIEGLKEADKDEFCRCELKLQKWYGDLRGKPFAIEAENSILDISGFSKQYNCAFIWQKDGVKKLNLYLIINYFKGGKLRFKKIKPEAFEANRFYTVINKKSGEIVPMEVNFNFDDPNLIILPLAFGKRQGREFIWNDLLSLETGSLKLANGRVIEKTLYNRRTRQDEPALFVALTFERREVLDSSNIKPMNLIGVDRGENIPAVIALTDPEGCPLSRFKDSLGNPTHILRIGESYKEKQRTIQAKKEVEQRRAGGYSRKYASKAKNLADDMVRNTARDLLYYAVTQDAMLIFENLSRGFGRQGKRTFMAERQYTRMEDWLTAKLAYEGLPSKTYLSKTLAQYTSKTCSNCGFTITSADYDRVLEKLKKTATGWMTTINGKELKVEGQITYYNRYKRQNVVKDLSVELDRLSEESVNNDISSWTKGRSGEALSLLKKRFSHRPVQEKFVCLNCGFETHADEQAALNIARSWLFLRSQEYKKYQTNKTTGNTDKRAFVETWQSFYRKKLKEVWKPAV

SEQ ID NO: 49144 - protein, 979 aa, synthetic construct
  REGION 1..979: note = engineered CasX variant
QEIKRINKIRRRLVKDSNTKKAGKTGPMKTLLVRVMTPDLRERLENLRKKPENIPQPISNTSRANLNKLLTDYTEMKKAILHVYWEEFQKDPVGLMSRVAQPASKKIDQNKLKPEMDEKGNLTTAGFACSQCGQPLFVYKLEQVSEKGKAYTNYFGRCNVAEHEKLILLAQLKPEKDSDEAVTYSLGKFGQRALDFYSIHVTKESTHPVKPLAQIAGNRYASGPVGKALRDACMGTIASFLSKYQDIIIEHQKVVKGNQKRLESLRELAGKENLEYPSVTLPPQPHTKEGVDAYNEVIARVRMWVNLNLWQKLKLSRDDAKPLLRLKGFPSFPLVERQANEVDWWDMVCNVKKLINEKKEDGKVFWQNLAGYKRQEALRPYLSSEEDREKGKKFARYQLGDLLLHLEKKHEGEDWGKVYDEAWERIDKKVEGLSKHIKLEEERRSEDAQSKAALTDWLRAKASFVIEGLKEADKDEFCRCELKLQKWYGDLRGKPFAIEAENSILDISGFSKQYNCAFIWQKDGVKKLNLYLIINYFKGGKLRFKKIKPEAFEANRFYTVINKKSGEIVPMEVNFNFDDPNLIILPLAFGKRQGREFIWNDLLSLETGSLKLANGRVIEKTLYNRRTRQDEPALFVALTFERREVLDSSNIKPMNLIGVDRGENIPAVIALTDPEGCPLSRFKDSLGNPTHILRIGESYKEKQRTIQAKKEVEQRRAGGYSRKYASKAKNLADDMVRNTARDLLYYAVTQDAMLIFENLSRGFGRQGKRTFMAERQYTRMEDWLTAKLAYEGLPSKTYLSKTLAQYTSKTCSNCGFTITSADYDRVLEKLKKTATGWMTTINGKELKVEGQITYYNRYKRQNVVKDLSVELDRLSEESVNNDISSWTKGRSGEALSLLKKRFSHRPVQEKFVCLNCGFETHADEQAALNIARSWLFLRSQEYKKYQTNKTTGNTDKRAFVETWQSFYRKKLKEVWKPAV

SEQ ID NO: 49145 - protein, 979 aa, synthetic construct
  REGION 1..979: note = engineered CasX variant
QEIKRINKIRRRLVKDSNTKKAGKTGPMKTLLVRVMTPDLRERLENLRKKPENIPQPISNTSRANLNKLLTDYTEMKKAILHVYWEEFQKDPVGLMSRVAQPASKKIDQNKLKPEMDEKGNLTTAGFACSQCGQPLFVYKLEQVSEKGKAYTNYFGRCNVAEHEKLILLAQLKPEKDSDEAVTYSLGKFGQRALDFYSIHVTKESTHPVKPLAQIAGNRYASGPVGKALRDACMGTIASFLSKYQDIIIEHQKVVKGNQKRLESLRELAGKENLEYPSVTLPPQPHTKEGVDAYNEVIARVRMWVNLNLWQKLKLSRDDAKPLLRLKGFPSFPLVERQANEVDWWDMVCNVKKLINEKKEDGKVFWQNLAGYKRQEALRPYLSSEEDRKKGKKFARYQLGDLLLHLEKKHEGEDWGKVYDEAWERIDKKVEGLSKHIKLEEERRSEDAQSKAALTDWLRAKASFVIEGLKEADKDEFCRCELKLQKWYGDLRGKPFAIEAENSILDISGFSKQYNCAFIWQKDGVKKLNLYLIINYFKGGKLRFKKIKPEAFEANRFYTVINKKSGEIVIMEVNFNFDDPNLIILPLAFGKRQGREFIWNDLLSLETGSLKLANGRVIEKTLYNRRTRQDEPALFVALTFERREVLDSSNIKPMNLIGVDRGENIPAVIALTDPEGCPLSRFKDSLGNPTHILRIGESYKEKQRTIQAKKEVEQRRAGGYSRKYASKAKNLADDMVRNTARDLLYYAVTQDAMLIFENLSRGFGRQGKRTFMAERQYTRMEDWLTAKLAYEGLPSKTYLSKTLAQYTSKTCSNCGFTITSADYDRVLEKLKKTATGWMTTINGKELKVEGQITYYNRYKRQNVVKDLSVELDRLSEESVNNDISSWTKGRSGEALSLLKKRFSHRPVQEKFVCLNCGFETHADEQAALNIARSWLFLRSQEYKKYQTNKTTGNTDKRAFVETWQSFYRKKLKEVWKPAV

SEQ ID NO: 49146 - protein, 978 aa, synthetic construct
  REGION 1..978: note = engineered CasX variant
QEIKRINKIRRRLVKDSNTKKAGKTGPMKTLLVRVMTPDLRERLENLRKKPENIPQPISNTSRANLNKLLTDYTEMKKAILHVYWEEFQKDPVGLMSRVAQPASKKIDQNKLKPEMDEKGNLTTAGFACSQCGQPLFVYKLEQVSEKGKAYTNYFGRCNVAEHEKLILLAQLKPEKDSDEAVTYSLGKFGQRALDFYSIHVTKESTHPVKPLAQIAGNRYASGPVGKALRGACMGTIASFLSKYQDIIIEHQKVVKGNQKRLESLRELAGKENLEYPSVTLPPQPHTKEGVDAYNEVIARVRMWVNLNLWQKLKLSRDDAKPLLRLKGFPSFPLVERQANEVDWWDMVCNVKKLINEKKEDGKVFWQNLAGYKRQEALRPYLSSEEDRKKGKKFARYQLGDLLLHLEKKHGEDWGKVYDEAWERIDKKVEGLSKHIKLEEERRSEDAQSKAALTDWLRAKASFVIEGLKEADKDEFCRCDLKLQKWYGDLRGKPFAIEAENSILDISGFSKQYNCAFIWQKDGVKKLNLYLIINYFKGGKLRFKKIKPEAFEANRFYTVINKKSGEIVPMEVNFNFDDPNLIILPLAFGKRQGREFIWNDLLSLETGSLKLANGRVIEKTLYNRRTRQDEPALFVALTFERREVLDSSNIKPMNLIGVDRGENIPAVIALTDPEGCPLSRFKDSLGNPTHILRIGESYKEKQRTIQAKKEVEQRRAGGYSRKYASKAKNLADDMVRNTARDLLYYAVTQDAMLIFENLSRGFGRQGKRTFMAERQYTRMEDWLTAKLAYEGLPSKTYLSKTLAQYTSKTCSNCGFTITSADYDRVLEKLKKTATGWMTTINGKELKVEGQITYYNRYKRQNVVKDLSVELDRLSEESVNNDISSWTKGRSGEALSLLKKRFSHRPVQEKFVCLNCGFETHADEQAALNIARSWLFLRSQEYKKYQTNKTTGNTDKRAFVETWQSFYRKKLKEVWKPAV

SEQ ID NO: 49147 - protein, 978 aa, synthetic construct
  REGION 1..978: note = engineered CasX variant
QEIKRINKIRRRLVKDSNTKKAGKTGPMKTLLVRVMTPDLRERLENLRKKPENIPQPISNTSRANLNKLLTDYTEMKKAILHVYWEEFQKDPVGLMSRVAQPASKKIDQNKLKPEMDEKGNLTTAGFACSQCGQPLFVYKLEQVSEKGKAYTNYFGRCNVAEHEKLILLAQLKPEKDSDEAVTYSLGKFGQRALDFYSIHVTKESTHPVKPLAQIAGNRYASGPVGKALRDACMGTIASFLSKYQDIIIEHQKVVKGNQKRLESLRELAGKENLEYPSVTLPPQPHTKEGVDAYNEVIARVRMWVNLNLWQKLKLSRDDAKPLLRLKNFPSFPLVERQANEVDWWDMVCNVKKLINEKKEDGKVFWQNLAGYKRQEALRPYLSSEEDRKKGKKFARYQLGDLLLHLEKKHGEDWGKVYDEAWERIDKKVEGLSKHIKLEEERRSEDAQSKAALTDWLRAKASFVIEGLKEADKDEFCRCDLKLQKWYGDLRGKPFAIEAENSILDISGFSKQYNCAFIWQKDGVKKLNLYLIINYFKGGKLRFKKIKPEAFEANRFYTVINKKSGEIVPMEVNFNFDDPNLIILPLAFGKRQGREFIWNDLLSLETGSLKLANGRVIEKTLYNRRTRQDEPALFVALTFERREVLDSSNIKPMNLIGVDRGENIPAVIALTDPEGCPLSRFKDSLGNPTHILRIGESYKEKQRTIQAKKEVEQRRAGGYSRKYASKAKNLADDMVRNTARDLLYYAVTQDAMLIFENLSRGFGRQGKRTFMAERQYTRMEDWLTAKLAYEGLPSKTYLSKTLAQYTSKTCSNCGFTITSADYDRVLEKLKKTATGWMTTINGKELKVEGQITYYNRYKRQNVVKDLSVELDRLSEESVNNDISSWTKGRSGEALSLLKKRFSHRPVQEKFVCLNCGFETHADEQAALNIARSWLFLRSQEYKKYQTNKTTGNTDKRAFVETWQSFYRKKLKEVWKPAV

SEQ ID NO: 49148 - protein, 978 aa, synthetic construct
  REGION 1..978: note = engineered CasX variant
QEIKRINKIRRRLVKDSNTKKAGKTGPMKTLLVRVMTPDLRERLENLRKKPENIPQPISNTSRANLNKLLTDYTEMKKAILHVYWEEFQKDPVGLMSRVAQPASKKIDQNKLKPEMDEKGNLTTAGFACSQCGQPLFVYKLEQVSEKGKAYTNYFGRCNVAEHEKLILLAQLKPEKDSDEAVTYSLGKFGQRALDFYSIHVTKESTHPVKPLAQIAGNRYASGPVGKALRDACMGTIASFLSKYQDIIIEHQKVVKGNQKRLESLRELAGKENLEYPSVTLPPQPHTKEGVDAYNEVIARVRMWVNLNLWQKLKLSRDDAKPLLRLKGFPSFPLVERQANEVDWWDMVCNVKKLINEKKEDGKVFWQNLAGYKRQEALRPYLSSEEDRKKGKKFARYQLGDLLNHLEKKHGEDWGKVYDEAWERIDKKVEGLSKHIKLEEERRSEDAQSKAALTDWLRAKASFVIEGLKEADKDEFCRCDLKLQKWYGDLRGKPFAIEAENSILDISGFSKQYNCAFIWQKDGVKKLNLYLIINYFKGGKLRFKKIKPEAFEANRFYTVINKKSGEIVPMEVNFNFDDPNLIILPLAFGKRQGREFIWNDLLSLETGSLKLANGRVIEKTLYNRRTRQDEPALFVALTFERREVLDSSNIKPMNLIGVDRGENIPAVIALTDPEGCPLSRFKDSLGNPTHILRIGESYKEKQRTIQAKKEVEQRRAGGYSRKYASKAKNLADDMVRNTARDLLYYAVTQDAMLIFENLSRGFGRQGKRTFMAERQYTRMEDWLTAKLAYEGLPSKTYLSKTLAQYTSKTCSNCGFTITSADYDRVLEKLKKTATGWMTTINGKELKVEGQITYYNRYKRQNVVKDLSVELDRLSEESVNNDISSWTKGRSGEALSLLKKRFSHRPVQEKFVCLNCGFETHADEQAALNIARSWLFLRSQEYKKYQTNKTTGNTDKRAFVETWQSFYRKKLKEVWKPAV

SEQ ID NO: 49149 - protein, 978 aa, synthetic construct
  REGION 1..978: note = engineered CasX variant
QEIKRINKIRRRLVKDSNTKKAGKTGPMKTLLVRVMTPDLRERLENLRKKPENIPQPISNTSRANLNKLLTDYTEMKKAILHVYWEEFQKDPVGLMSRVAQPASKKIDQNKLKPEMDEKGNLTTAGFACSQCGQPLFVYKLEQVSEKGKAYTNYFGRCNVAEHEKLILLAQLKPEKDSDEAVTYSLGKFGQRALDFYSIHVTKESTHPVKPLAQIAGNRYASGPVGKALRDACMGTIASFLSKYQDIIIEHQKVVKGNQKRLESLRELAGKENLEYPSVTLPPQPHTKEGVDAYNEVIARVRMWVNLNLWQKLKLSRDDAKPLLRLKGFPSFPLVERQANEVDWWDMVCNVKKLINEKKEDGKVFWQNLAGYKRQEALRPYLSSEEDRKKGKKFARYQLGDLLWHLEKKHGEDWGKVYDEAWERIDKKVEGLSKHIKLEEERRSEDAQSKAALTDWLRAKASFVIEGLKEADKDEFCRCDLKLQKWYGDLRGKPFAIEAENSILDISGFSKQYNCAFIWQKDGVKKLNLYLIINYFKGGKLRFKKIKPEAFEANRFYTVINKKSGEIVPMEVNFNFDDPNLIILPLAFGKRQGREFIWNDLLSLETGSLKLANGRVIEKTLYNRRTRQDEPALFVALTFERREVLDSSNIKPMNLIGVDRGENIPAVIALTDPEGCPLSRFKDSLGNPTHILRIGESYKEKQRTIQAKKEVEQRRAGGYSRKYASKAKNLADDMVRNTARDLLYYAVTQDAMLIFENLSRGFGRQGKRTFMAERQYTRMEDWLTAKLAYEGLPSKTYLSKTLAQYTSKTCSNCGFTITSADYDRVLEKLKKTATGWMTTINGKELKVEGQITYYNRYKRQNVVKDLSVELDRLSEESVNNDISSWTKGRSGEALSLLKKRFSHRPVQEKFVCLNCGFETHADEQAALNIARSWLFLRSQEYKKYQTNKTTGNTDKRAFVETWQSFYRKKLKEVWKPAV

SEQ ID NO: 49150 - protein, 978 aa, synthetic construct
  REGION 1..978: note = engineered CasX variant
QEIKRINKIRRRLVKDSNTKKAGKTGPMKTLLVRVMTPDLRERLENLRKKPENIPQPISNTSRANLNKLLTDYTEMKKAILHVYWEEFQKDPVGLMSRVAQPASKKIDQNKLKPEMDEKGNLTTAGFACSQCGQPLFVYKLEQVSEKGKAYTNYFGRCNVAEHEKLILLAQLKPEKDSDEAVTYSLGKFGQRALDFYSIHVTKESTHPVKPLAQIAGNRYASGPVGKALRDACMGTIASFLSKYQDIIIEHQKVVKGNQKRLESLRELAGKENLEYPSVTLPPQPHTKEGVDAYNEVIARVRMWVNLNLWQKLKLSRDDAKPLLRLKGFPSFPLVERQANEVDWWDMVCNVKKLINEKKEDGKVFWQNLAGYKRQEALRPYLSSEEDRKKGKKFARYQLGDLLLHLYKKHGEDWGKVYDEAWERIDKKVEGLSKHIKLEEERRSEDAQSKAALTDWLRAKASFVIEGLKEADKDEFCRCDLKLQKWYGDLRGKPFAIEAENSILDISGFSKQYNCAFIWQKDGVKKLNLYLIINYFKGGKLRFKKIKPEAFEANRFYTVINKKSGEIVPMEVNFNFDDPNLIILPLAFGKRQGREFIWNDLLSLETGSLKLANGRVIEKTLYNRRTRQDEPALFVALTFERREVLDSSNIKPMNLIGVDRGENIPAVIALTDPEGCPLSRFKDSLGNPTHILRIGESYKEKQRTIQAKKEVEQRRAGGYSRKYASKAKNLADDMVRNTARDLLYYAVTQDAMLIFENLSRGFGRQGKRTFMAERQYTRMEDWLTAKLAYEGLPSKTYLSKTLAQYTSKTCSNCGFTITSADYDRVLEKLKKTATGWMTTINGKELKVEGQITYYNRYKRQNVVKDLSVELDRLSEESVNNDISSWTKGRSGEALSLLKKRFSHRPVQEKFVCLNCGFETHADEQAALNIARSWLFLRSQEYKKYQTNKTTGNTDKRAFVETWQSFYRKKLKEVWKPAV

SEQ ID NO: 49151 - protein, 978 aa, synthetic construct
  REGION 1..978: note = engineered CasX variant
QEIKRINKIRRRLVKDSNTKKAGKTGPMKTLLVRVMTPDLRERLENLRKKPENIPQPISNTSRANLNKLLTDYTEMKKAILHVYWEEFQKDPVGLMSRVAQPASKKIDQNKLKPEMDEKGNLTTAGFACSQCGQPLFVYKLEQVSEKGKAYTNYFGRCNVAEHEKLILLAQLKPEKDSDEAVTYSLGKFGQRALDFYSIHVTKESTHPVKPLAQIAGNRYASGPVGKALRDACMGTIASFLSKYQDIIIEHQKVVKGNQKRLESLRELAGKENLEYPSVTLPPQPHTKEGVDAYNEVIARVRMWVNLNLWQKLKLSRDDAKPLLRLKGFPSFPLVERQANEVDWWDMVCNVKKLINEKKEDGKVFWQNLAGYKRQEALRPYLSSEEDRKKGKKFARYQLGDLLLHLEKKHPEDWGKVYDEAWERIDKKVEGLSKHIKLEEERRSEDAQSKAALTDWLRAKASFVIEGLKEADKDEFCRCDLKLQKWYGDLRGKPFAIEAENSILDISGFSKQYNCAFIWQKDGVKKLNLYLIINYFKGGKLRFKKIKPEAFEANRFYTVINKKSGEIVPMEVNFNFDDPNLIILPLAFGKRQGREFIWNDLLSLETGSLKLANGRVIEKTLYNRRTRQDEPALFVALTFERREVLDSSNIKPMNLIGVDRGENIPAVIALTDPEGCPLSRFKDSLGNPTHILRIGESYKEKQRTIQAKKEVEQRRAGGYSRKYASKAKNLADDMVRNTARDLLYYAVTQDAMLIFENLSRGFGRQGKRTFMAERQYTRMEDWLTAKLAYEGLPSKTYLSKTLAQYTSKTCSNCGFTITSADYDRVLEKLKKTATGWMTTINGKELKVEGQITYYNRYKRQNVVKDLSVELDRLSEESVNNDISSWTKGRSGEALSLLKKRFSHRPVQEKFVCLNCGFETHADEQAALNIARSWLFLRSQEYKKYQTNKTTGNTDKRAFVETWQSFYRKKLKEVWKPAV

SEQ ID NO: 49152 - protein, 979 aa, synthetic construct
  REGION 1..979: note = engineered CasX variant
QEIKRINKIRRRLVKDSNTKKAGKTGPMKTLLVRVMTPDLRERLENLRKKPENIPQPISNTSRANLNKLLTDYTEMKKAILHVYWEEFQKDPVGLMSRVAQPASKKIDQNKLKPEMDEKGNLTTAGFACSQCGQPLFVYKLEQVSEKGKAYTNYFGRCNVAEHEKLILLAQLKPEKDSDEAVTYSLGKFGQRALDFYSIHVTKESTHPVKPLAQIAGNRYASGPVGKALRDACMGTIASFLSKYQDIIIEHQKVVKGNQKRLESLRELAGKENLEYPSVTLPPQPHTKEGVDAYNEVIARVRMWVNLNLWQKLKLSRDDAKPLLRLKGFPSFPLVERQANEVDWWDMVCNVKKLINEKKEDGKVFWQNLAGYKRQEALRPYLSSEEDRKKGKKFARYQLGDLLLHLEKKHGERDWGKVYDEAWERIDKKVEGLSKHIKLEEERRSEDAQSKAALTDWLRAKASFVIEGLKEADKDEFCRCDLKLQKWYGDLRGKPFAIEAENSILDISGFSKQYNCAFIWQKDGVKKLNLYLIINYFKGGKLRFKKIKPEAFEANRFYTVINKKSGEIVPMEVNFNFDDPNLIILPLAFGKRQGREFIWNDLLSLETGSLKLANGRVIEKTLYNRRTRQDEPALFVALTFERREVLDSSNIKPMNLIGVDRGENIPAVIALTDPEGCPLSRFKDSLGNPTHILRIGESYKEKQRTIQAKKEVEQRRAGGYSRKYASKAKNLADDMVRNTARDLLYYAVTQDAMLIFENLSRGFGRQGKRTFMAERQYTRMEDWLTAKLAYEGLPSKTYLSKTLAQYTSKTCSNCGFTITSADYDRVLEKLKKTATGWMTTINGKELKVEGQITYYNRYKRQNVVKDLSVELDRLSEESVNNDISSWTKGRSGEALSLLKKRFSHRPVQEKFVCLNCGFETHADEQAALNIARSWLFLRSQEYKKYQTNKTTGNTDKRAFVETWQSFYRKKLKEVWKPAV

SEQ ID NO: 49153 - protein, 979 aa, synthetic construct
  REGION 1..979: note = engineered CasX variant
QEIKRINKIRRRLVKDSNTKKAGKTGPMKTLLVRVMTPDLRERLENLRKKPENIPQPISNTSRANLNKLLTDYTEMKKAILHVYWEEFQKDPVGLMSRVAQPASKKIDQNKLKPEMDEKGNLTTAGFACSQCGQPLFVYKLEQVSEKGKAYTNYFGRCNVAEHEKLILLAQLKPEKDSDEAVTYSLGKFGQRALDFYSIHVTKESTHPVKPLAQIAGNRYASGPVGKALRDACMGTIASFLSKYQDIIIEHQKVVKGNQKRLESLRELAGKENLEYPSVTLPPQPHTKEGVDAYNEVIARVRMWVNLNLWQKLKLSRDDAKPLLRLKGFPSFPLVERQANEVDWWDMVCNVKKLINEKKEDGKVFWQNLAGYKRQEALRPYLSSEEDRKKGKKFARYQLGDLLLHLEKKHGEYDWGKVYDEAWERIDKKVEGLSKHIKLEEERRSEDAQSKAALTDWLRAKASFVIEGLKEADKDEFCRCDLKLQKWYGDLRGKPFAIEAENSILDISGFSKQYNCAFIWQKDGVKKLNLYLIINYFKGGKLRFKKIKPEAFEANRFYTVINKKSGEIVPMEVNFNFDDPNLIILPLAFGKRQGREFIWNDLLSLETGSLKLANGRVIEKTLYNRRTRQDEPALFVALTFERREVLDSSNIKPMNLIGVDRGENIPAVIALTDPEGCPLSRFKDSLGNPTHILRIGESYKEKQRTIQAKKEVEQRRAGGYSRKYASKAKNLADDMVRNTARDLLYYAVTQDAMLIFENLSRGFGRQGKRTFMAERQYTRMEDWLTAKLAYEGLPSKTYLSKTLAQYTSKTCSNCGFTITSADYDRVLEKLKKTATGWMTTINGKELKVEGQITYYNRYKRQNVVKDLSVELDRLSEESVNNDISSWTKGRSGEALSLLKKRFSHRPVQEKFVCLNCGFETHADEQAALNIARSWLFLRSQEYKKYQTNKTTGNTDKRAFVETWQSFYRKKLKEVWKPAV

SEQ ID NO: 49154 - protein, 978 aa, synthetic construct
  REGION 1..978: note = engineered CasX variant
QEIKRINKIRRRLVKDSNTKKAGKTGPMKTLLVRVMTPDLRERLENLRKKPENIPQPISNTSRANLNKLLTDYTEMKKAILHVYWEEFQKDPVGLMSRVAQPASKKIDQNKLKPEMDEKGNLTTAGFACSQCGQPLFVYKLEQVSEKGKAYTNYFGRCNVAEHEKLILLAQLKPEKDSDEAVTYSLGKFGQRALDFYSIHVTKESTHPVKPLAQIAGNRYASGPVGKALRDACMGTIASFLSKYQDIIIEHQKVVKGNQKRLESLRELAGKENLEYPSVTLPPQPHTKEGVDAYNEVIARVRMWVNLNLWQKLKLSRDDAKPLLRLKGFPSFPLVERQANEVDWWDMVCNVKKLINEKKEDGKVFWQNLAGYKRQEALRPYLSSEEDRKKGKKFARYQLGDLLLHLEKKHGEDWGDVYDEAWERIDKKVEGLSKHIKLEEERRSEDAQSKAALTDWLRAKASFVIEGLKEADKDEFCRCDLKLQKWYGDLRGKPFAIEAENSILDISGFSKQYNCAFIWQKDGVKKLNLYLIINYFKGGKLRFKKIKPEAFEANRFYTVINKKSGEIVPMEVNFNFDDPNLIILPLAFGKRQGREFIWNDLLSLETGSLKLANGRVIEKTLYNRRTRQDEPALFVALTFERREVLDSSNIKPMNLIGVDRGENIPAVIALTDPEGCPLSRFKDSLGNPTHILRIGESYKEKQRTIQAKKEVEQRRAGGYSRKYASKAKNLADDMVRNTARDLLYYAVTQDAMLIFENLSRGFGRQGKRTFMAERQYTRMEDWLTAKLAYEGLPSKTYLSKTLAQYTSKTCSNCGFTITSADYDRVLEKLKKTATGWMTTINGKELKVEGQITYYNRYKRQNVVKDLSVELDRLSEESVNNDISSWTKGRSGEALSLLKKRFSHRPVQEKFVCLNCGFETHADEQAALNIARSWLFLRSQEYKKYQTNKTTGNTDKRAFVETWQSFYRKKLKEVWKPAV

SEQ ID NO: 49155 - protein, 978 aa, synthetic construct
  REGION 1..978: note = engineered CasX variant
QEIKRINKIRRRLVKDSNTKKAGKTGPMKTLLVRVMTPDLRERLENLRKKPENIPQPISNTSRANLNKLLTDYTEMKKAILHVYWEEFQKDPVGLMSRVAQPASKKIDQNKLKPEMDEKGNLTTAGFACSQCGQPLFVYKLEQVSEKGKAYTNYFGRCNVAEHEKLILLAQLKPEKDSDEAVTYSLGKFGQRALDFYSIHVTKESTHPVKPLAQIAGNRYASGPVGKALRDACMGTIASFLSKYQDIIIEHQKVVKGNQKRLESLRELAGKENLEYPSVTLPPQPHTKEGVDAYNEVIARVRMWVNLNLWQKLKLSRDDAKPLLRLKGFPSFPLVERQANEVDWWDMVCNVKKLINEKKEDGKVFWQNLAGYKRQEALRPYLSSEEDRKKGKKFARYQLGDLLLHLEKKHGEDWGKVYGEAWERIDKKVEGLSKHIKLEEERRSEDAQSKAALTDWLRAKASFVIEGLKEADKDEFCRCDLKLQKWYGDLRGKPFAIEAENSILDISGFSKQYNCAFIWQKDGVKKLNLYLIINYFKGGKLRFKKIKPEAFEANRFYTVINKKSGEIVPMEVNFNFDDPNLIILPLAFGKRQGREFIWNDLLSLETGSLKLANGRVIEKTLYNRRTRQDEPALFVALTFERREVLDSSNIKPMNLIGVDRGENIPAVIALTDPEGCPLSRFKDSLGNPTHILRIGESYKEKQRTIQAKKEVEQRRAGGYSRKYASKAKNLADDMVRNTARDLLYYAVTQDAMLIFENLSRGFGRQGKRTFMAERQYTRMEDWLTAKLAYEGLPSKTYLSKTLAQYTSKTCSNCGFTITSADYDRVLEKLKKTATGWMTTINGKELKVEGQITYYNRYKRQNVVKDLSVELDRLSEESVNNDISSWTKGRSGEALSLLKKRFSHRPVQEKFVCLNCGFETHADEQAALNIARSWLFLRSQEYKKYQTNKTTGNTDKRAFVETWQSFYRKKLKEVWKPAV

SEQ ID NO: 49156 - protein, 978 aa, synthetic construct
  REGION 1..978: note = engineered CasX variant
QEIKRINKIRRRLVKDSNTKKAGKTGPMKTLLVRVMTPDLRERLENLRKKPENIPQPISNTSRANLNKLLTDYTEMKKAILHVYWEEFQKDPVGLMSRVAQPASKKIDQNKLKPEMDEKGNLTTAGFACSQCGQPLFVYKLEQVSEKGKAYTNYFGRCNVAEHEKLILLAQLKPEKDSDEAVTYSLGKFGQRALDFYSIHVTKESTHPVKPLAQIAGNRYASGPVGKALRDACMGTIASFLSKYQDIIIEHQKVVKGNQKRLESLRELAGKENLEYPSVTLPPQPHTKEGVDAYNEVIARVRMWVNLNLWQKLKLSRDDAKPLLRLKGFPSFPLVERQANEVDWWDMVCNVKKLINEKKEDGKVFWQNLAGYKRQEALRPYLSSEEDRKKGKKFARYQLGDLLLHLEKKHGEDWGKVYDEAWERIDKKVEGLSKHIKLEEERRSEDAQSKAALTDWLRAKASFVIEGKKEADKDEFCRCDLKLQKWYGDLRGKPFAIEAENSILDISGFSKQYNCAFIWQKDGVKKLNLYLIINYFKGGKLRFKKIKPEAFEANRFYTVINKKSGEIVPMEVNFNFDDPNLIILPLAFGKRQGREFIWNDLLSLETGSLKLANGRVIEKTLYNRRTRQDEPALFVALTFERREVLDSSNIKPMNLIGVDRGENIPAVIALTDPEGCPLSRFKDSLGNPTHILRIGESYKEKQRTIQAKKEVEQRRAGGYSRKYASKAKNLADDMVRNTARDLLYYAVTQDAMLIFENLSRGFGRQGKRTFMAERQYTRMEDWLTAKLAYEGLPSKTYLSKTLAQYTSKTCSNCGFTITSADYDRVLEKLKKTATGWMTTINGKELKVEGQITYYNRYKRQNVVKDLSVELDRLSEESVNNDISSWTKGRSGEALSLLKKRFSHRPVQEKFVCLNCGFETHADEQAALNIARSWLFLRSQEYKKYQTNKTTGNTDKRAFVETWQSFYRKKLKEVWKPAV

SEQ ID NO: 49157 - protein, 978 aa, synthetic construct
  REGION 1..978: note = engineered CasX variant
QEIKRINKIRRRLVKDSNTKKAGKTGPMKTLLVRVMTPDLRERLENLRKKPENIPQPISNTSRANLNKLLTDYTEMKKAILHVYWEEFQKDPVGLMSRVAQPASKKIDQNKLKPEMDEKGNLTTAGFACSQCGQPLFVYKLEQVSEKGKAYTNYFGRCNVAEHEKLILLAQLKPEKDSDEAVTYSLGKFGQRALDFYSIHVTKESTHPVKPLAQIAGNRYASGPVGKALRDACMGTIASFLSKYQDIIIEHQKVVKGNQKRLESLRELAGKENLEYPSVTLPPQPHTKEGVDAYNEVIARVRMWVNLNLWQKLKLSRDDAKPLLRLKGFPSFPLVERQANEVDWWDMVCNVKKLINEKKEDGKVFWQNLAGYKRQEALRPYLSSEEDRKKGKKFARYQLGDLLLHLEKKHGEDWGKVYDEAWERIDKKVEGLSKHIKLEEERRSEDAQSKAALTDWLRAKASFVIEGSKEADKDEFCRCDLKLQKWYGDLRGKPFAIEAENSILDISGFSKQYNCAFIWQKDGVKKLNLYLIINYFKGGKLRFKKIKPEAFEANRFYTVINKKSGEIVPMEVNFNFDDPNLIILPLAFGKRQGREFIWNDLLSLETGSLKLANGRVIEKTLYNRRTRQDEPALFVALTFERREVLDSSNIKPMNLIGVDRGENIPAVIALTDPEGCPLSRFKDSLGNPTHILRIGESYKEKQRTIQAKKEVEQRRAGGYSRKYASKAKNLADDMVRNTARDLLYYAVTQDAMLIFENLSRGFGRQGKRTFMAERQYTRMEDWLTAKLAYEGLPSKTYLSKTLAQYTSKTCSNCGFTITSADYDRVLEKLKKTATGWMTTINGKELKVEGQITYYNRYKRQNVVKDLSVELDRLSEESVNNDISSWTKGRSGEALSLLKKRFSHRPVQEKFVCLNCGFETHADEQAALNIARSWLFLRSQEYKKYQTNKTTGNTDKRAFVETWQSFYRKKLKEVWKPAV

SEQ ID NO: 49158 - protein, 979 aa, synthetic construct
  REGION 1..979: note = engineered CasX variant
QEIKRINKIRRRLVKDSNTKKAGKTGPMKTLLVRVMTPDLRERLENLRKKPENIPQPISNTSRANLNKLLTDYTEMKKAILHVYWEEFQKDPVGLMSRVAQPASKKIDQNKLKPEMDEKGNLTTAGFACSQCGQPLFVYKLEQVSEKGKAYTNYFGRCNVAEHEKLILLAQLKPEKDSDEAVTYSLGKFGQRALDFYSIHVTKESTHPVKPLAQIAGNRYASGPVGKALRDACMGTIASFLSKYQDIIIEHQKVVKGNQKRLESLRELAGKENLEYPSVTLPPQPHTKEGVDAYNEVIARVRMWVNLNLWQKLKLSRDDAKPLLRLKGFPSFPLVERQANEVDWWDMVCNVKKLINEKKEDGKVFWQNLAGYKRQEALRPYLSSEEDRKKGKKFARYQLGDLLLHLEKKHGEDWGKVYDEAWERIDKKVEGLSKHIKLEEERRSEDAQSKAALTDWLRAKASFVIEGLKEADDKDEFCRCDLKLQKWYGDLRGKPFAIEAENSILDISGFSKQYNCAFIWQKDGVKKLNLYLIINYFKGGKLRFKKIKPEAFEANRFYTVINKKSGEIVPMEVNFNFDDPNLIILPLAFGKRQGREFIWNDLLSLETGSLKLANGRVIEKTLYNRRTRQDEPALFVALTFERREVLDSSNIKPMNLIGVDRGENIPAVIALTDPEGCPLSRFKDSLGNPTHILRIGESYKEKQRTIQAKKEVEQRRAGGYSRKYASKAKNLADDMVRNTARDLLYYAVTQDAMLIFENLSRGFGRQGKRTFMAERQYTRMEDWLTAKLAYEGLPSKTYLSKTLAQYTSKTCSNCGFTITSADYDRVLEKLKKTATGWMTTINGKELKVEGQITYYNRYKRQNVVKDLSVELDRLSEESVNNDISSWTKGRSGEALSLLKKRFSHRPVQEKFVCLNCGFETHADEQAALNIARSWLFLRSQEYKKYQTNKTTGNTDKRAFVETWQSFYRKKLKEVWKPAV

SEQ ID NO: 49159 - protein, 979 aa, synthetic construct
  REGION 1..979: note = engineered CasX variant
QEIKRINKIRRRLVKDSNTKKAGKTGPMKTLLVRVMTPDLRERLENLRKKPENIPQPISNTSRANLNKLLTDYTEMKKAILHVYWEEFQKDPVGLMSRVAQPASKKIDQNKLKPEMDEKGNLTTAGFACSQCGQPLFVYKLEQVSEKGKAYTNYFGRCNVAEHEKLILLAQLKPEKDSDEAVTYSLGKFGQRALDFYSIHVTKESTHPVKPLAQIAGNRYASGPVGKALRDACMGTIASFLSKYQDIIIEHQKVVKGNQKRLESLRELAGKENLEYPSVTLPPQPHTKEGVDAYNEVIARVRMWVNLNLWQKLKLSRDDAKPLLRLKGFPSFPLVERQANEVDWWDMVCNVKKLINEKKEDGKVFWQNLAGYKRQEALRPYLSSEEDRKKGKKFARYQLGDLLLHLEKKHGEDWGKVYDEAWERIDKKVEGLSKHIKLEEERRSEDAQSKAALTDWLRAKASFVIEGLKEADKDEFCRCDLKLQKWYGDLRGKPFAIEAENSILDISGFSKQYNCAFIWQKDGVKKLNLYLIINYFKGGKLRFKKIKPEAFEANRFYTVINKKSGEIVPMEVNFNFDDPNLIILPLAFGKRQGREFIWNDLLSLETGSLKLANGRVIEKTLYNRRTRQDEPALFVALTFERREVLDSSNIKPMNLIGVDRGENIPAVIALTDPEGCPLSRFKDSLGNPTHILRIGESYKEKQRTIQAKKEVEQRRAGGYSRKYASKAKNLADDMVRNTARDLLYYAVTQDAMLIFENLSRGFGRQGKRTFMAERQYTRMEDWLTAKLAYEGLPSKTYLSKTLAQYTSKTCSNCGFTITSADYDRVLEKLKKTATGWMTTINGKELKVEGQITYYNRYKRQNVVKDLSVELDRLSEESVNNDISSWTKGRSGNEALSLLKKRFSHRPVQEKFVCLNCGFETHADEQAALNIARSWLFLRSQEYKKYQTNKTTGNTDKRAFVETWQSFYRKKLKEVWKPAV

SEQ ID NO: 49160 - protein, 978 aa, synthetic construct
  REGION 1..978: note = engineered CasX variant
QEIKRINKIRRRLVKDSNTKKAGKTGPMKTLLVRVMTPDLRERLENLRKKPENIPQPISNTSRANLNKLLTDYTEMKKAILHVYWEEFQKDPVGLMSRVAQPASKKIDQNKLKPEMDEKGNLTTAGFACSQCGQPLFVYKLEQVSEKGKAYTNYFGRCNVAEHEKLILLAQLKPEKDSDEAVTYSLGKFGQRALDFYSIHVTKESTHPVKPLAQIAGNRYASGPVGKALRDACMGTIASFLSKYQDIIIEHQKVVKGNQKRLESLRELAGKENLEYPSVTLPPQPHTKEGVDAYNEVIARVRMWVNLNLWQKLKLSRDDAKPLLRLKGFPSFPLVERQANEVDWWDMVCNVKKLINEKKEDGKVFWQNLAGYKRQEALRPYLSSEEDRQKGKKFARYQLGDLLLHLEKKHGEDWGKVYDEAWERIDKKVEGLSKHIKLEEERRSEDAQSKAALTDWLRAKASFVIEGLKEADKDEFCRCDLKLQKWYGDLRGKPFAIEAENSILDISGFSKQYNCAFIWQKDGVKKLNLYLIINYFKGGKLRFKKIKPEAFEANRFYTVINKKSGEIVPMEVNFNFDDPNLIILPLAFGKRQGREFIWNDLLSLETGSLKLANGRVIEKTLYNRRTRQDEPALFVALTFERREVLDSSNIKPMNLIGVDRGENIPAVIALTDPEGCPLSRFKDSLGNPTHILRIGESYKEKQRTIQAKKEVEQRRAGGYSRKYASKAKNLADDMVRNTARDLLYYAVTQDAMLIFENLSRGFGRQGKRTFMAERQYTRMEDWLTAKLAYEGLPSKTYLSKTLAQYTSKTCSNCGFTITSADYDRVLEKLKKTATGWMTTINGKELKVEGQITYYNRYKRQNVVKDLSVELDRLSEESVNNDISSWTKGRSGEALSLLKKRFSHRPVQEKFVCLNCGFETHADEQAALNIARSWLFLRSQEYKKYQTNKTTGNTDKRAFVETWQSFYRKKLKEVWKPAV

SEQ ID NO: 49161 - protein, 978 aa, synthetic construct
  REGION 1..978: note = engineered CasX variant
QEIKRINKIRRRLVKDSNTKKAGKTGPMKTLLVRVMTPDLRERLENLRKKPENIPQPISNTSRANLNKLLTDYTEMKKAILHVYWEEFQKDPVGLMSRVAQPASKKIDQNKLKPEMDEKGNLTTAGFACSQCGQPLFVYKLEQVSEKGKAYTNYFGRCNVAEHEKLILLAQLKPEKDSDEAVTYSLGKFGQRALDFYSIHVTKESTHPVKPLAQIAGNRYASGPVGKALRDACMGTIASFLSKYQDIIIEHQKVVKGNQKRLESLRELAGKENLEYPSVTLPPQPHTKEGVDAYNEVIARVRMWVNLNLWQKLKLSRDDAKPLLRLKGFPSFPLVERQANEVDWWDMVCNVKKLINEKKEDGKVFWQNLAGYKRQEALRPYLSSEEDRKKGKKFARYQLGDLLLHLEKKHGEDWGKVYDEAWERIDKKVEGLSKHIKLEEERRSEDAQSKAALTDWLRAKASFVIEGLKEADKDEFCRCDLKLQKWYGDLRGKPFAIEAENSILDISGFSKQYNCAFIWQKDGVKKLNLYLIINYFKGGKLRFKKIKPEAFEANRFYTVINKKSGEIVPMEVNFNFDDPNLIILPLAFGKRQGREFIWNDLLSLETGSLKLANGRVIEKTLYNRRTRQDEPALFVALTFERREVLDSSNIKPMNLIGVDRGENIPAVIALTDPEGCPLSRFKDSLGNPTHILRIGESYKEKQRTIQAKKEVEQRRAGGYSRKYASKAKNLADDMVRNTARDLLYYAVTQDAMLIFENLSRGFGRQGKRTFMAERQYTRMEDWLTAKLAYEGLPSQTYLSKTLAQYTSKTCSNCGFTITSADYDRVLEKLKKTATGWMTTINGKELKVEGQITYYNRYKRQNVVKDLSVELDRLSEESVNNDISSWTKGRSGEALSLLKKRFSHRPVQEKFVCLNCGFETHADEQAALNIARSWLFLRSQEYKKYQTNKTTGNTDKRAFVETWQSFYRKKLKEVWKPAV

SEQ ID NO: 49162 - protein, 978 aa, synthetic construct
  REGION 1..978: note = engineered CasX variant
QEIKRINKIRRRLVKDSNTKKAGKTGPMKTLLVRVMTPDLRERLENLRKKPENIPQPISNTSRANLNKLLTDYTEMKKAILHVYWEEFQKDPVGLMSRVAQPASKKIDQNKLKPEMDEKGNLTTAGFACSQCGQPLFVYKLEQVSEKGKAYTNYFGRCNVAEHEKLILLAQLKPEKDSDEAVTYSLGKFGQRALDFYSIHVTKESTHPVKPLAQIAGNRYASGPVGKALRDACMGTIASFLSKYQDIIIEHQKVVKGNQKRLESLRELAGKENLEYPSVTLPPQPHTKEGVDAYNEVIARVRMWVNLNLWQKLKLSRDDAKPLLRLKGFPSFPLVERQANEVDWWDMVCNVKKLINEKKEDGKVFWQNLAGYKRQEALRPYLSSEEDRKKGKKFARYQLGDLLLHLEKKHGEDWGKVYDEAWERIDKKVEGLSKHIKLEEERRSEDAQSKAALTDWLRAKASFVIEGLKEADKDEFCRCDLKLQKWYGDLRGKPFAIEAENSILDISGFSKQYNCAFIWQKDGVKKLNLYLIINYFKGGKLRFKKIKPEAFEANRFYTVINKKSGEIVPMEVNFNFDDPNLIILPLAFGKRQGREFIWNDLLSLETGSLKLANGRVIEKTLYNRRTRQDEPALFVALTFERREVLDSSNIKPMNLIGVDRGENIPAVIALTDPEGCPLSRFKDSLGNPTHILRIGESYKEKQRTIQAKKEVEQRRAGGYSRKYASKAKNLADDMVRNTARDLLYYAVTQDAMLIFENLSRGFGRQGKRTFMAERQYTRMEDWLTAKLAYNGLPSKTYLSKTLAQYTSKTCSNCGFTITSADYDRVLEKLKKTATGWMTTINGKELKVEGQITYYNRYKRQNVVKDLSVELDRLSEESVNNDISSWTKGRSGEALSLLKKRFSHRPVQEKFVCLNCGFETHADEQAALNIARSWLFLRSQEYKKYQTNKTTGNTDKRAFVETWQSFYRKKLKEVWKPAV

SEQ ID NO: 49163 - protein, 978 aa, synthetic construct
  REGION 1..978: note = engineered CasX variant
QEIKRINKIRRRLVKDSNTKKAGKTGPMKTLLVRVMTPDLRERLENLRKKPENIPQPISNTSRANLNKLLTDYTEMKKAILHVYWEEFQKDPVGLMSRVAQPASKKIDQNKLKPEMDEKGNLTTAGFACSQCGQPLFVYKLEQVSEKGKAYTNYFGRCNVAEHEKLIQLAQLKPEKDSDEAVTYSLGKFGQRALDFYSIHVTKESTHPVKPLAQIAGNRYASGPVGKALRDACMGTIASFLSKYQDIIIEHQKVVKGNQKRLESLRELAGKENLEYPSVTLPPQPHTKEGVDAYNEVIARVRMWVNLNLWQKLKLSRDDAKPLLRLKGFPSFPLVERQANEVDWWDMVCNVKKLINEKKEDGKVFWQNLAGYKRQEALRPYLSSEEDRKKGKKFARYQLGDLLLHLEKKHGEDWGKVYDEAWERIDKKVEGLSKHIKLEEERRSEDAQSKAALTDWLRAKASFVIEGLKEADKDEFCRCDLKLQKWYGDLRGKPFAIEAENSILDISGFSKQYNCAFIWQKDGVKKLNLYLIINYFKGGKLRFKKIKPEAFEANRFYTVINKKSGEIVPMEVNFNFDDPNLIILPLAFGKRQGREFIWNDLLSLETGSLKLANGRVIEKTLYNRRTRQDEPALFVALTFERREVLDSSNIKPMNLIGVDRGENIPAVIALTDPEGCPLSRFKDSLGNPTHILRIGESYKEKQRTIQAKKEVEQRRAGGYSRKYASKAKNLADDMVRNTARDLLYYAVTQDAMLIFENLSRGFGRQGKRTFMAERQYTRMEDWLTAKLAYEGLPSKTYLSKTLAQYTSKTCSNCGFTITSADYDRVLEKLKKTATGWMTTINGKELKVEGQITYYNRYKRQNVVKDLSVELDRLSEESVNNDISSWTKGRSGEALSLLKKRFSHRPVQEKFVCLNCGFETHADEQAALNIARSWLFLRSQEYKKYQTNKTTGNTDKRAFVETWQSFYRKKLKEVWKPAV

SEQ ID NO: 49164 - protein, 978 aa, synthetic construct
  REGION 1..978: note = engineered CasX variant
QEIKRINKIRRRLVKDSNTKKAGKTGPMKTLLVRVMTPDLRERLENLRKKPENIPQPISNTSRANLNKLLTDYTEMKKAILHVYWEEFQKDPVGLMSRVAQPASKKIDQNKLKPEMDEKGNLTTAGFACSQCGQPLFVYKLEQVSEKGKAYTNYFGRCNVAEHEKLILLAQLKPEKDSDEAVTYSLGKFGQRALDFYSIHVTKESTHPVKPLAQIAGNRYASGPVGKALRDACMGTIASFLSKYQDIIIEHQKVVKGNQKRLESLRELAGKENLEYPSVTLPPQPHTKEGVDAYNEVIARVRMWVNLNLWQKLKLSRDDAKPLLRLKGFPSFPLVERQANEVDWWDMVCNVKKLINEKKEDGKVFWQNLAIYKRQEALRPYLSSEEDRKKGKKFARYQLGDLLLHLEKKHGEDWGKVYDEAWERIDKKVEGLSKHIKLEEERRSEDAQSKAALTDWLRAKASFVIEGLKEADKDEFCRCDLKLQKWYGDLRGKPFAIEAENSILDISGFSKQYNCAFIWQKDGVKKLNLYLIINYFKGGKLRFKKIKPEAFEANRFYTVINKKSGEIVPMEVNFNFDDPNLIILPLAFGKRQGREFIWNDLLSLETGSLKLANGRVIEKTLYNRRTRQDEPALFVALTFERREVLDSSNIKPMNLIGVDRGENIPAVIALTDPEGCPLSRFKDSLGNPTHILRIGESYKEKQRTIQAKKEVEQRRAGGYSRKYASKAKNLADDMVRNTARDLLYYAVTQDAMLIFENLSRGFGRQGKRTFMAERQYTRMEDWLTAKLAYEGLPSKTYLSKTLAQYTSKTCSNCGFTITSADYDRVLEKLKKTATGWMTTINGKELKVEGQITYYNRYKRQNVVKDLSVELDRLSEESVNNDISSWTKGRSGEALSLLKKRFSHRPVQEKFVCLNCGFETHADEQAALNIARSWLFLRSQEYKKYQTNKTTGNTDKRAFVETWQSFYRKKLKEVWKPAV

SEQ ID NO: 49165 - protein, 978 aa, synthetic construct
  REGION 1..978: note = engineered CasX variant
QEIKRINKIRRRLVKDSNTKKAGKTGPMKTLLVRVMTPDLRERLENLRKKPENIPQPISNTSRANLNKLLTDYTEMKKAILHVYWEEFQKDPVGLMSRVAQPASKKIDQNKLKPEMDEKGNLTTAGFACSQCGQPLFVYKLEQVSEKGKAYTNYFGRCNVAEHEKLILLAQLKPEKDSDEAVTYSLGKFGQRALDFYSIHVTKESTHPVKPLAQIAGNRYASGPVGKALRDACMGTIASFLSKYQDIIIEHQKVVKGNQKRLESLRELAGKENLEYPSVTLPPQPHTKEGVDAYNEVIARVRMWVNLNLWQKLKLSRDDAKPLLRLKGFPSFPLVERQANEVDWWDMVCNVKKLINEKKEDGKVFWQNLAGYKRQEALRPYLSSEEDREKGKKFARYQLGDLLLHLEKKHGEDWGKVYDEAWERIDKKVEGLSKHIKLEEERRSEDAQSKAALTDWLRAKASFVIEGLKEADKDEFCRCDLKLQKWYGDLRGKPFAIEAENSILDISGFSKQYNCAFIWQKDGVKKLNLYLIINYFKGGKLRFKKIKPEAFEANRFYTVINKKSGEIVPMEVNFNFDDPNLIILPLAFGKRQGREFIWNDLLSLETGSLKLANGRVIEKTLYNRRTRQDEPALFVALTFERREVLDSSNIKPMNLIGVDRGENIPAVIALTDPEGCPLSRFKDSLGNPTHILRIGESYKEKQRTIQAKKEVEQRRAGGYSRKYASKAKNLADDMVRNTARDLLYYAVTQDAMLIFENLSRGFGRQGKRTFMAERQYTRMEDWLTAKLAYEGLPSKTYLSKTLAQYTSKTCSNCGFTITSADYDRVLEKLKKTATGWMTTINGKELKVEGQITYYNRYKRQNVVKDLSVELDRLSEESVNNDISSWTKGRSGEALSLLKKRFSHRPVQEKFVCLNCGFETHADEQAALNIARSWLFLRSQEYKKYQTNKTTGNTDKRAFVETWQSFYRKKLKEVWKPAV

SEQ ID NO: 49166 - protein, 978 aa, synthetic construct
  REGION 1..978: note = engineered CasX variant
QEIKRINKIRRRLVKDSNTKKAGKTGPMKTLLVRVMTPDLRERLENLRKKPENIPQPISNTSRANLNKLLTDYTEMKKAILHVYWEEFQKDPVGLMSRVAQPASKKIDQNKLKPEMDEKGNLTTAGFACSQCGQPLFVYKLEQVSEKGKAYTNYFGRCNVAEHEKLILLAQLKPEKDSDEAVTYSLGKFGQRALDFYSIHVTKESTHPVKPLAQIAGNRYASGPVGKALRDACMGTIASFLSKYQDIIIEHQKVVKGNQKRLESLRELAGKENLEYPSVTLPPQPHTKEGVDAYNEVIARVRMWVNLNLWQKLKLSRDDAKPLLRLKGFPSFPLVERQANEVDWWDMVCNVKKLINEKKEDGKVFWQNLAGYKRQEALRPYLSSEEDRKKGKKFARYQLGDLLLHLEKKHGEDWGKVYDEAWERIDKKVEGLSKHIKLEEERRSEDAQSKAALTDWLRAKASFVIEGLKEADKDEFCRCDLKLQKWYGDLRGKPFAIEAENSILDISGFSKQYNCAFIWQKDGVKKLNLYLIINYFKGGKLRFKKIKPEAFEANRFYTVINKKSGEIVIMEVNFNFDDPNLIILPLAFGKRQGREFIWNDLLSLETGSLKLANGRVIEKTLYNRRTRQDEPALFVALTFERREVLDSSNIKPMNLIGVDRGENIPAVIALTDPEGCPLSRFKDSLGNPTHILRIGESYKEKQRTIQAKKEVEQRRAGGYSRKYASKAKNLADDMVRNTARDLLYYAVTQDAMLIFENLSRGFGRQGKRTFMAERQYTRMEDWLTAKLAYEGLPSKTYLSKTLAQYTSKTCSNCGFTITSADYDRVLEKLKKTATGWMTTINGKELKVEGQITYYNRYKRQNVVKDLSVELDRLSEESVNNDISSWTKGRSGEALSLLKKRFSHRPVQEKFVCLNCGFETHADEQAALNIARSWLFLRSQEYKKYQTNKTTGNTDKRAFVETWQSFYRKKLKEVWKPAV

SEQ ID NO: 49167 - protein, 978 aa, synthetic construct
  REGION 1..978: note = engineered CasX variant
QEIKRINKIRRRLVKDSNTKKAGKTGPMKTLLVRVMTPDLRERLENLRKKPENIPQPISNTSRANLNKLLTDYTEMKKAILHVYWEEFQKDPVGLMSRVAQPASKKIDQNKLKPEMDEKGNLTTAGFACSQCGQPLFVYKLEQVSEKGKAYTNYFGRCNVAEHEKLILLAQLKPEKDSDEAVTYSLGKFGQRALDFYSIHVTKESTHPVKPLAQIAGNRYASGPVGKALRGACMGTIASFLSKYQDIIIEHQKVVKGNQKRLESLRELAGKENLEYPSVTLPPQPHTKEGVDAYNEVIARVRMWVNLNLWQKLKLSRDDAKPLLRLKGFPSFPLVERQANEVDWWDMVCNVKKLINEKKEDGKVFWQNLAGYKRQEALRPYLSSEEDRKKGKKFARYQLGDLLLHLEKKHGEDWGKVYDEAWERIDKKVEGLSKHIKLEEERRSEDAQSKAALTDWLRAKASFVIEGLKEADKDEFCRCELKLQKWYGDLRGKPFAIEAENSILDISGFSKQYNCAFIWQKDGVKKLNLYLIINYFKGGKLRFKKIKPEAFEANRFYTVINKKSGEIVPMEVNFNFDDPNLIILPLAFGKRFGREFIWNDLLSLETGSLKLANGRVIEKTLYNRRTRQDEPALFVALTFERREVLDSSNIKPMNLIGVDRGENIPAVIALTDPEGCPLSRFKDSLGNPTHILRIGESYKEKQRTIQAKKEVEQRRAGGYSRKYASKAKNLADDMVRNTARDLLYYAVTQDAMLIFENLSRGFGRQGKRTFMAERQYTRMEDWLTAKLAYEGLPSKTYLSKTLAQYTSKTCSNCGFTITSADYDRVLEKLKKTATGWMTTINGKELKVEGQITYYNRYKRQNVVKDLSVELDRLSEESVNNDISSWTKGRSGEALSLLKKRFSHRPVQEKFVCLNCGFETHADEQAALNIARSWLFLRSQEYKKYQTNKTTGNTDKRAFVETWQSFYRKKLKEVWKPAV

SEQ ID NO: 49168 - protein, 978 aa, synthetic construct
  REGION 1..978: note = engineered CasX variant
QEIKRINKIRRRLVKDSNTKKAGKTGPMKTLLVRVMTPDLRERLENLRKKPENIPQPISNTSRANLNKLLTDYTEMKKAILHVYWEEFQKDPVGLMSRVAQPASKKIDQNKLKPEMDEKGNLTTAGFACSQCGQPLFVYKLEQVSEKGKAYTNYFGRCNVAEHEKLILLAQLKPEKDSDEAVTYSLGKFGQRALDFYSIHVTKESTHPVKPLAQIAGNRYASGPVGKALRDACMGTIASFLSKYQDIIIEHQKVVKGNQKRLESLRELAGKENLEYPSVTLPPQPHTKEGVDAYNEVIARVRMWVNLNLWQKLKLSRDDAKPLLRLKNFPSFPLVERQANEVDWWDMVCNVKKLINEKKEDGKVFWQNLAGYKRQEALRPYLSSEEDRKKGKKFARYQLGDLLLHLEKKHGEDWGKVYDEAWERIDKKVEGLSKHIKLEEERRSEDAQSKAALTDWLRAKASFVIEGLKEADKDEFCRCELKLQKWYGDLRGKPFAIEAENSILDISGFSKQYNCAFIWQKDGVKKLNLYLIINYFKGGKLRFKKIKPEAFEANRFYTVINKKSGEIVPMEVNFNFDDPNLIILPLAFGKRFGREFIWNDLLSLETGSLKLANGRVIEKTLYNRRTRQDEPALFVALTFERREVLDSSNIKPMNLIGVDRGENIPAVIALTDPEGCPLSRFKDSLGNPTHILRIGESYKEKQRTIQAKKEVEQRRAGGYSRKYASKAKNLADDMVRNTARDLLYYAVTQDAMLIFENLSRGFGRQGKRTFMAERQYTRMEDWLTAKLAYEGLPSKTYLSKTLAQYTSKTCSNCGFTITSADYDRVLEKLKKTATGWMTTINGKELKVEGQITYYNRYKRQNVVKDLSVELDRLSEESVNNDISSWTKGRSGEALSLLKKRFSHRPVQEKFVCLNCGFETHADEQAALNIARSWLFLRSQEYKKYQTNKTTGNTDKRAFVETWQSFYRKKLKEVWKPAV

SEQ ID NO: 49169 - protein, 978 aa, synthetic construct
  REGION 1..978: note = engineered CasX variant
QEIKRINKIRRRLVKDSNTKKAGKTGPMKTLLVRVMTPDLRERLENLRKKPENIPQPISNTSRANLNKLLTDYTEMKKAILHVYWEEFQKDPVGLMSRVAQPASKKIDQNKLKPEMDEKGNLTTAGFACSQCGQPLFVYKLEQVSEKGKAYTNYFGRCNVAEHEKLILLAQLKPEKDSDEAVTYSLGKFGQRALDFYSIHVTKESTHPVKPLAQIAGNRYASGPVGKALRDACMGTIASFLSKYQDIIIEHQKVVKGNQKRLESLRELAGKENLEYPSVTLPPQPHTKEGVDAYNEVIARVRMWVNLNLWQKLKLSRDDAKPLLRLKGFPSFPLVERQANEVDWWDMVCNVKKLINEKKEDGKVFWQNLAGYKRQEALRPYLSSEEDRKKGKKFARYQLGDLLNHLEKKHGEDWGKVYDEAWERIDKKVEGLSKHIKLEEERRSEDAQSKAALTDWLRAKASFVIEGLKEADKDEFCRCELKLQKWYGDLRGKPFAIEAENSILDISGFSKQYNCAFIWQKDGVKKLNLYLIINYFKGGKLRFKKIKPEAFEANRFYTVINKKSGEIVPMEVNFNFDDPNLIILPLAFGKRFGREFIWNDLLSLETGSLKLANGRVIEKTLYNRRTRQDEPALFVALTFERREVLDSSNIKPMNLIGVDRGENIPAVIALTDPEGCPLSRFKDSLGNPTHILRIGESYKEKQRTIQAKKEVEQRRAGGYSRKYASKAKNLADDMVRNTARDLLYYAVTQDAMLIFENLSRGFGRQGKRTFMAERQYTRMEDWLTAKLAYEGLPSKTYLSKTLAQYTSKTCSNCGFTITSADYDRVLEKLKKTATGWMTTINGKELKVEGQITYYNRYKRQNVVKDLSVELDRLSEESVNNDISSWTKGRSGEALSLLKKRFSHRPVQEKFVCLNCGFETHADEQAALNIARSWLFLRSQEYKKYQTNKTTGNTDKRAFVETWQSFYRKKLKEVWKPAV

SEQ ID NO: 49170 - protein, 978 aa, synthetic construct
  REGION 1..978: note = engineered CasX variant
QEIKRINKIRRRLVKDSNTKKAGKTGPMKTLLVRVMTPDLRERLENLRKKPENIPQPISNTSRANLNKLLTDYTEMKKAILHVYWEEFQKDPVGLMSRVAQPASKKIDQNKLKPEMDEKGNLTTAGFACSQCGQPLFVYKLEQVSEKGKAYTNYFGRCNVAEHEKLILLAQLKPEKDSDEAVTYSLGKFGQRALDFYSIHVTKESTHPVKPLAQIAGNRYASGPVGKALRDACMGTIASFLSKYQDIIIEHQKVVKGNQKRLESLRELAGKENLEYPSVTLPPQPHTKEGVDAYNEVIARVRMWVNLNLWQKLKLSRDDAKPLLRLKGFPSFPLVERQANEVDWWDMVCNVKKLINEKKEDGKVFWQNLAGYKRQEALRPYLSSEEDRKKGKKFARYQLGDLLWHLEKKHGEDWGKVYDEAWERIDKKVEGLSKHIKLEEERRSEDAQSKAALTDWLRAKASFVIEGLKEADKDEFCRCELKLQKWYGDLRGKPFAIEAENSILDISGFSKQYNCAFIWQKDGVKKLNLYLIINYFKGGKLRFKKIKPEAFEANRFYTVINKKSGEIVPMEVNFNFDDPNLIILPLAFGKRFGREFIWNDLLSLETGSLKLANGRVIEKTLYNRRTRQDEPALFVALTFERREVLDSSNIKPMNLIGVDRGENIPAVIALTDPEGCPLSRFKDSLGNPTHILRIGESYKEKQRTIQAKKEVEQRRAGGYSRKYASKAKNLADDMVRNTARDLLYYAVTQDAMLIFENLSRGFGRQGKRTFMAERQYTRMEDWLTAKLAYEGLPSKTYLSKTLAQYTSKTCSNCGFTITSADYDRVLEKLKKTATGWMTTINGKELKVEGQITYYNRYKRQNVVKDLSVELDRLSEESVNNDISSWTKGRSGEALSLLKKRFSHRPVQEKFVCLNCGFETHADEQAALNIARSWLFLRSQEYKKYQTNKTTGNTDKRAFVETWQSFYRKKLKEVWKPAV

SEQ ID NO: 49171 - protein, 978 aa, synthetic construct
  REGION 1..978: note = engineered CasX variant
QEIKRINKIRRRLVKDSNTKKAGKTGPMKTLLVRVMTPDLRERLENLRKKPENIPQPISNTSRANLNKLLTDYTEMKKAILHVYWEEFQKDPVGLMSRVAQPASKKIDQNKLKPEMDEKGNLTTAGFACSQCGQPLFVYKLEQVSEKGKAYTNYFGRCNVAEHEKLILLAQLKPEKDSDEAVTYSLGKFGQRALDFYSIHVTKESTHPVKPLAQIAGNRYASGPVGKALRDACMGTIASFLSKYQDIIIEHQKVVKGNQKRLESLRELAGKENLEYPSVTLPPQPHTKEGVDAYNEVIARVRMWVNLNLWQKLKLSRDDAKPLLRLKGFPSFPLVERQANEVDWWDMVCNVKKLINEKKEDGKVFWQNLAGYKRQEALRPYLSSEEDRKKGKKFARYQLGDLLLHLYKKHGEDWGKVYDEAWERIDKKVEGLSKHIKLEEERRSEDAQSKAALTDWLRAKASFVIEGLKEADKDEFCRCELKLQKWYGDLRGKPFAIEAENSILDISGFSKQYNCAFIWQKDGVKKLNLYLIINYFKGGKLRFKKIKPEAFEANRFYTVINKKSGEIVPMEVNFNFDDPNLIILPLAFGKRFGREFIWNDLLSLETGSLKLANGRVIEKTLYNRRTRQDEPALFVALTFERREVLDSSNIKPMNLIGVDRGENIPAVIALTDPEGCPLSRFKDSLGNPTHILRIGESYKEKQRTIQAKKEVEQRRAGGYSRKYASKAKNLADDMVRNTARDLLYYAVTQDAMLIFENLSRGFGRQGKRTFMAERQYTRMEDWLTAKLAYEGLPSKTYLSKTLAQYTSKTCSNCGFTITSADYDRVLEKLKKTATGWMTTINGKELKVEGQITYYNRYKRQNVVKDLSVELDRLSEESVNNDISSWTKGRSGEALSLLKKRFSHRPVQEKFVCLNCGFETHADEQAALNIARSWLFLRSQEYKKYQTNKTTGNTDKRAFVETWQSFYRKKLKEVWKPAV

SEQ ID NO: 49172 - protein, 978 aa, synthetic construct
  REGION 1..978: note = engineered CasX variant
QEIKRINKIRRRLVKDSNTKKAGKTGPMKTLLVRVMTPDLRERLENLRKKPENIPQPISNTSRANLNKLLTDYTEMKKAILHVYWEEFQKDPVGLMSRVAQPASKKIDQNKLKPEMDEKGNLTTAGFACSQCGQPLFVYKLEQVSEKGKAYTNYFGRCNVAEHEKLILLAQLKPEKDSDEAVTYSLGKFGQRALDFYSIHVTKESTHPVKPLAQIAGNRYASGPVGKALRDACMGTIASFLSKYQDIIIEHQKVVKGNQKRLESLRELAGKENLEYPSVTLPPQPHTKEGVDAYNEVIARVRMWVNLNLWQKLKLSRDDAKPLLRLKGFPSFPLVERQANEVDWWDMVCNVKKLINEKKEDGKVFWQNLAGYKRQEALRPYLSSEEDRKKGKKFARYQLGDLLLHLEKKHPEDWGKVYDEAWERIDKKVEGLSKHIKLEEERRSEDAQSKAALTDWLRAKASFVIEGLKEADKDEFCRCELKLQKWYGDLRGKPFAIEAENSILDISGFSKQYNCAFIWQKDGVKKLNLYLIINYFKGGKLRFKKIKPEAFEANRFYTVINKKSGEIVPMEVNFNFDDPNLIILPLAFGKRFGREFIWNDLLSLETGSLKLANGRVIEKTLYNRRTRQDEPALFVALTFERREVLDSSNIKPMNLIGVDRGENIPAVIALTDPEGCPLSRFKDSLGNPTHILRIGESYKEKQRTIQAKKEVEQRRAGGYSRKYASKAKNLADDMVRNTARDLLYYAVTQDAMLIFENLSRGFGRQGKRTFMAERQYTRMEDWLTAKLAYEGLPSKTYLSKTLAQYTSKTCSNCGFTITSADYDRVLEKLKKTATGWMTTINGKELKVEGQITYYNRYKRQNVVKDLSVELDRLSEESVNNDISSWTKGRSGEALSLLKKRFSHRPVQEKFVCLNCGFETHADEQAALNIARSWLFLRSQEYKKYQTNKTTGNTDKRAFVETWQSFYRKKLKEVWKPAV

SEQ ID NO: 49173 - protein, 979 aa, synthetic construct
  REGION 1..979: note = engineered CasX variant
QEIKRINKIRRRLVKDSNTKKAGKTGPMKTLLVRVMTPDLRERLENLRKKPENIPQPISNTSRANLNKLLTDYTEMKKAILHVYWEEFQKDPVGLMSRVAQPASKKIDQNKLKPEMDEKGNLTTAGFACSQCGQPLFVYKLEQVSEKGKAYTNYFGRCNVAEHEKLILLAQLKPEKDSDEAVTYSLGKFGQRALDFYSIHVTKESTHPVKPLAQIAGNRYASGPVGKALRDACMGTIASFLSKYQDIIIEHQKVVKGNQKRLESLRELAGKENLEYPSVTLPPQPHTKEGVDAYNEVIARVRMWVNLNLWQKLKLSRDDAKPLLRLKGFPSFPLVERQANEVDWWDMVCNVKKLINEKKEDGKVFWQNLAGYKRQEALRPYLSSEEDRKKGKKFARYQLGDLLLHLEKKHGERDWGKVYDEAWERIDKKVEGLSKHIKLEEERRSEDAQSKAALTDWLRAKASFVIEGLKEADKDEFCRCELKLQKWYGDLRGKPFAIEAENSILDISGFSKQYNCAFIWQKDGVKKLNLYLIINYFKGGKLRFKKIKPEAFEANRFYTVINKKSGEIVPMEVNFNFDDPNLIILPLAFGKRFGREFIWNDLLSLETGSLKLANGRVIEKTLYNRRTRQDEPALFVALTFERREVLDSSNIKPMNLIGVDRGENIPAVIALTDPEGCPLSRFKDSLGNPTHILRIGESYKEKQRTIQAKKEVEQRRAGGYSRKYASKAKNLADDMVRNTARDLLYYAVTQDAMLIFENLSRGFGRQGKRTFMAERQYTRMEDWLTAKLAYEGLPSKTYLSKTLAQYTSKTCSNCGFTITSADYDRVLEKLKKTATGWMTTINGKELKVEGQITYYNRYKRQNVVKDLSVELDRLSEESVNNDISSWTKGRSGEALSLLKKRFSHRPVQEKFVCLNCGFETHADEQAALNIARSWLFLRSQEYKKYQTNKTTGNTDKRAFVETWQSFYRKKLKEVWKPAV

SEQ ID NO: 49174 - protein, 979 aa, synthetic construct
  REGION 1..979: note = engineered CasX variant
QEIKRINKIRRRLVKDSNTKKAGKTGPMKTLLVRVMTPDLRERLENLRKKPENIPQPISNTSRANLNKLLTDYTEMKKAILHVYWEEFQKDPVGLMSRVAQPASKKIDQNKLKPEMDEKGNLTTAGFACSQCGQPLFVYKLEQVSEKGKAYTNYFGRCNVAEHEKLILLAQLKPEKDSDEAVTYSLGKFGQRALDFYSIHVTKESTHPVKPLAQIAGNRYASGPVGKALRDACMGTIASFLSKYQDIIIEHQKVVKGNQKRLESLRELAGKENLEYPSVTLPPQPHTKEGVDAYNEVIARVRMWVNLNLWQKLKLSRDDAKPLLRLKGFPSFPLVERQANEVDWWDMVCNVKKLINEKKEDGKVFWQNLAGYKRQEALRPYLSSEEDRKKGKKFARYQLGDLLLHLEKKHGEYDWGKVYDEAWERIDKKVEGLSKHIKLEEERRSEDAQSKAALTDWLRAKASFVIEGLKEADKDEFCRCELKLQKWYGDLRGKPFAIEAENSILDISGFSKQYNCAFIWQKDGVKKLNLYLIINYFKGGKLRFKKIKPEAFEANRFYTVINKKSGEIVPMEVNFNFDDPNLIILPLAFGKRFGREFIWNDLLSLETGSLKLANGRVIEKTLYNRRTRQDEPALFVALTFERREVLDSSNIKPMNLIGVDRGENIPAVIALTDPEGCPLSRFKDSLGNPTHILRIGESYKEKQRTIQAKKEVEQRRAGGYSRKYASKAKNLADDMVRNTARDLLYYAVTQDAMLIFENLSRGFGRQGKRTFMAERQYTRMEDWLTAKLAYEGLPSKTYLSKTLAQYTSKTCSNCGFTITSADYDRVLEKLKKTATGWMTTINGKELKVEGQITYYNRYKRQNVVKDLSVELDRLSEESVNNDISSWTKGRSGEALSLLKKRFSHRPVQEKFVCLNCGFETHADEQAALNIARSWLFLRSQEYKKYQTNKTTGNTDKRAFVETWQSFYRKKLKEVWKPAV

SEQ ID NO: 49175 - protein, 978 aa, synthetic construct
  REGION 1..978: note = engineered CasX variant
QEIKRINKIRRRLVKDSNTKKAGKTGPMKTLLVRVMTPDLRERLENLRKKPENIPQPISNTSRANLNKLLTDYTEMKKAILHVYWEEFQKDPVGLMSRVAQPASKKIDQNKLKPEMDEKGNLTTAGFACSQCGQPLFVYKLEQVSEKGKAYTNYFGRCNVAEHEKLILLAQLKPEKDSDEAVTYSLGKFGQRALDFYSIHVTKESTHPVKPLAQIAGNRYASGPVGKALRDACMGTIASFLSKYQDIIIEHQKVVKGNQKRLESLRELAGKENLEYPSVTLPPQPHTKEGVDAYNEVIARVRMWVNLNLWQKLKLSRDDAKPLLRLKGFPSFPLVERQANEVDWWDMVCNVKKLINEKKEDGKVFWQNLAGYKRQEALRPYLSSEEDRKKGKKFARYQLGDLLLHLEKKHGEDWGDVYDEAWERIDKKVEGLSKHIKLEEERRSEDAQSKAALTDWLRAKASFVIEGLKEADKDEFCRCELKLQKWYGDLRGKPFAIEAENSILDISGFSKQYNCAFIWQKDGVKKLNLYLIINYFKGGKLRFKKIKPEAFEANRFYTVINKKSGEIVPMEVNFNFDDPNLIILPLAFGKRFGREFIWNDLLSLETGSLKLANGRVIEKTLYNRRTRQDEPALFVALTFERREVLDSSNIKPMNLIGVDRGENIPAVIALTDPEGCPLSRFKDSLGNPTHILRIGESYKEKQRTIQAKKEVEQRRAGGYSRKYASKAKNLADDMVRNTARDLLYYAVTQDAMLIFENLSRGFGRQGKRTFMAERQYTRMEDWLTAKLAYEGLPSKTYLSKTLAQYTSKTCSNCGFTITSADYDRVLEKLKKTATGWMTTINGKELKVEGQITYYNRYKRQNVVKDLSVELDRLSEESVNNDISSWTKGRSGEALSLLKKRFSHRPVQEKFVCLNCGFETHADEQAALNIARSWLFLRSQEYKKYQTNKTTGNTDKRAFVETWQSFYRKKLKEVWKPAV

SEQ ID NO: 49176 - protein, 978 aa, synthetic construct
  REGION 1..978: note = engineered CasX variant
QEIKRINKIRRRLVKDSNTKKAGKTGPMKTLLVRVMTPDLRERLENLRKKPENIPQPISNTSRANLNKLLTDYTEMKKAILHVYWEEFQKDPVGLMSRVAQPASKKIDQNKLKPEMDEKGNLTTAGFACSQCGQPLFVYKLEQVSEKGKAYTNYFGRCNVAEHEKLILLAQLKPEKDSDEAVTYSLGKFGQRALDFYSIHVTKESTHPVKPLAQIAGNRYASGPVGKALRDACMGTIASFLSKYQDIIIEHQKVVKGNQKRLESLRELAGKENLEYPSVTLPPQPHTKEGVDAYNEVIARVRMWVNLNLWQKLKLSRDDAKPLLRLKGFPSFPLVERQANEVDWWDMVCNVKKLINEKKEDGKVFWQNLAGYKRQEALRPYLSSEEDRKKGKKFARYQLGDLLLHLEKKHGEDWGKVYGEAWERIDKKVEGLSKHIKLEEERRSEDAQSKAALTDWLRAKASFVIEGLKEADKDEFCRCELKLQKWYGDLRGKPFAIEAENSILDISGFSKQYNCAFIWQKDGVKKLNLYLIINYFKGGKLRFKKIKPEAFEANRFYTVINKKSGEIVPMEVNFNFDDPNLIILPLAFGKRFGREFIWNDLLSLETGSLKLANGRVIEKTLYNRRTRQDEPALFVALTFERREVLDSSNIKPMNLIGVDRGENIPAVIALTDPEGCPLSRFKDSLGNPTHILRIGESYKEKQRTIQAKKEVEQRRAGGYSRKYASKAKNLADDMVRNTARDLLYYAVTQDAMLIFENLSRGFGRQGKRTFMAERQYTRMEDWLTAKLAYEGLPSKTYLSKTLAQYTSKTCSNCGFTITSADYDRVLEKLKKTATGWMTTINGKELKVEGQITYYNRYKRQNVVKDLSVELDRLSEESVNNDISSWTKGRSGEALSLLKKRFSHRPVQEKFVCLNCGFETHADEQAALNIARSWLFLRSQEYKKYQTNKTTGNTDKRAFVETWQSFYRKKLKEVWKPAV

SEQ ID NO: 49177 - protein, 978 aa, synthetic construct
  REGION 1..978: note = engineered CasX variant
QEIKRINKIRRRLVKDSNTKKAGKTGPMKTLLVRVMTPDLRERLENLRKKPENIPQPISNTSRANLNKLLTDYTEMKKAILHVYWEEFQKDPVGLMSRVAQPASKKIDQNKLKPEMDEKGNLTTAGFACSQCGQPLFVYKLEQVSEKGKAYTNYFGRCNVAEHEKLILLAQLKPEKDSDEAVTYSLGKFGQRALDFYSIHVTKESTHPVKPLAQIAGNRYASGPVGKALRDACMGTIASFLSKYQDIIIEHQKVVKGNQKRLESLRELAGKENLEYPSVTLPPQPHTKEGVDAYNEVIARVRMWVNLNLWQKLKLSRDDAKPLLRLKGFPSFPLVERQANEVDWWDMVCNVKKLINEKKEDGKVFWQNLAGYKRQEALRPYLSSEEDRKKGKKFARYQLGDLLLHLEKKHGEDWGKVYDEAWERIDKKVEGLSKHIKLEEERRSEDAQSKAALTDWLRAKASFVIEGKKEADKDEFCRCELKLQKWYGDLRGKPFAIEAENSILDISGFSKQYNCAFIWQKDGVKKLNLYLIINYFKGGKLRFKKIKPEAFEANRFYTVINKKSGEIVPMEVNFNFDDPNLIILPLAFGKRFGREFIWNDLLSLETGSLKLANGRVIEKTLYNRRTRQDEPALFVALTFERREVLDSSNIKPMNLIGVDRGENIPAVIALTDPEGCPLSRFKDSLGNPTHILRIGESYKEKQRTIQAKKEVEQRRAGGYSRKYASKAKNLADDMVRNTARDLLYYAVTQDAMLIFENLSRGFGRQGKRTFMAERQYTRMEDWLTAKLAYEGLPSKTYLSKTLAQYTSKTCSNCGFTITSADYDRVLEKLKKTATGWMTTINGKELKVEGQITYYNRYKRQNVVKDLSVELDRLSEESVNNDISSWTKGRSGEALSLLKKRFSHRPVQEKFVCLNCGFETHADEQAALNIARSWLFLRSQEYKKYQTNKTTGNTDKRAFVETWQSFYRKKLKEVWKPAV

SEQ ID NO: 49178 - protein, 978 aa, synthetic construct
  REGION 1..978: note = engineered CasX variant
QEIKRINKIRRRLVKDSNTKKAGKTGPMKTLLVRVMTPDLRERLENLRKKPENIPQPISNTSRANLNKLLTDYTEMKKAILHVYWEEFQKDPVGLMSRVAQPASKKIDQNKLKPEMDEKGNLTTAGFACSQCGQPLFVYKLEQVSEKGKAYTNYFGRCNVAEHEKLILLAQLKPEKDSDEAVTYSLGKFGQRALDFYSIHVTKESTHPVKPLAQIAGNRYASGPVGKALRDACMGTIASFLSKYQDIIIEHQKVVKGNQKRLESLRELAGKENLEYPSVTLPPQPHTKEGVDAYNEVIARVRMWVNLNLWQKLKLSRDDAKPLLRLKGFPSFPLVERQANEVDWWDMVCNVKKLINEKKEDGKVFWQNLAGYKRQEALRPYLSSEEDRKKGKKFARYQLGDLLLHLEKKHGEDWGKVYDEAWERIDKKVEGLSKHIKLEEERRSEDAQSKAALTDWLRAKASFVIEGSKEADKDEFCRCELKLQKWYGDLRGKPFAIEAENSILDISGFSKQYNCAFIWQKDGVKKLNLYLIINYFKGGKLRFKKIKPEAFEANRFYTVINKKSGEIVPMEVNFNFDDPNLIILPLAFGKRFGREFIWNDLLSLETGSLKLANGRVIEKTLYNRRTRQDEPALFVALTFERREVLDSSNIKPMNLIGVDRGENIPAVIALTDPEGCPLSRFKDSLGNPTHILRIGESYKEKQRTIQAKKEVEQRRAGGYSRKYASKAKNLADDMVRNTARDLLYYAVTQDAMLIFENLSRGFGRQGKRTFMAERQYTRMEDWLTAKLAYEGLPSKTYLSKTLAQYTSKTCSNCGFTITSADYDRVLEKLKKTATGWMTTINGKELKVEGQITYYNRYKRQNVVKDLSVELDRLSEESVNNDISSWTKGRSGEALSLLKKRFSHRPVQEKFVCLNCGFETHADEQAALNIARSWLFLRSQEYKKYQTNKTTGNTDKRAFVETWQSFYRKKLKEVWKPAV

SEQ ID NO: 49179 - protein, 979 aa, synthetic construct
  REGION 1..979: note = engineered CasX variant
QEIKRINKIRRRLVKDSNTKKAGKTGPMKTLLVRVMTPDLRERLENLRKKPENIPQPISNTSRANLNKLLTDYTEMKKAILHVYWEEFQKDPVGLMSRVAQPASKKIDQNKLKPEMDEKGNLTTAGFACSQCGQPLFVYKLEQVSEKGKAYTNYFGRCNVAEHEKLILLAQLKPEKDSDEAVTYSLGKFGQRALDFYSIHVTKESTHPVKPLAQIAGNRYASGPVGKALRDACMGTIASFLSKYQDIIIEHQKVVKGNQKRLESLRELAGKENLEYPSVTLPPQPHTKEGVDAYNEVIARVRMWVNLNLWQKLKLSRDDAKPLLRLKGFPSFPLVERQANEVDWWDMVCNVKKLINEKKEDGKVFWQNLAGYKRQEALRPYLSSEEDRKKGKKFARYQLGDLLLHLEKKHGEDWGKVYDEAWERIDKKVEGLSKHIKLEEERRSEDAQSKAALTDWLRAKASFVIEGLKEADDKDEFCRCELKLQKWYGDLRGKPFAIEAENSILDISGFSKQYNCAFIWQKDGVKKLNLYLIINYFKGGKLRFKKIKPEAFEANRFYTVINKKSGEIVPMEVNFNFDDPNLIILPLAFGKRFGREFIWNDLLSLETGSLKLANGRVIEKTLYNRRTRQDEPALFVALTFERREVLDSSNIKPMNLIGVDRGENIPAVIALTDPEGCPLSRFKDSLGNPTHILRIGESYKEKQRTIQAKKEVEQRRAGGYSRKYASKAKNLADDMVRNTARDLLYYAVTQDAMLIFENLSRGFGRQGKRTFMAERQYTRMEDWLTAKLAYEGLPSKTYLSKTLAQYTSKTCSNCGFTITSADYDRVLEKLKKTATGWMTTINGKELKVEGQITYYNRYKRQNVVKDLSVELDRLSEESVNNDISSWTKGRSGEALSLLKKRFSHRPVQEKFVCLNCGFETHADEQAALNIARSWLFLRSQEYKKYQTNKTTGNTDKRAFVETWQSFYRKKLKEVWKPAV

SEQ ID NO: 49180 - protein, 979 aa, synthetic construct
  REGION 1..979: note = engineered CasX variant
QEIKRINKIRRRLVKDSNTKKAGKTGPMKTLLVRVMTPDLRERLENLRKKPENIPQPISNTSRANLNKLLTDYTEMKKAILHVYWEEFQKDPVGLMSRVAQPASKKIDQNKLKPEMDEKGNLTTAGFACSQCGQPLFVYKLEQVSEKGKAYTNYFGRCNVAEHEKLILLAQLKPEKDSDEAVTYSLGKFGQRALDFYSIHVTKESTHPVKPLAQIAGNRYASGPVGKALRDACMGTIASFLSKYQDIIIEHQKVVKGNQKRLESLRELAGKENLEYPSVTLPPQPHTKEGVDAYNEVIARVRMWVNLNLWQKLKLSRDDAKPLLRLKGFPSFPLVERQANEVDWWDMVCNVKKLINEKKEDGKVFWQNLAGYKRQEALRPYLSSEEDRKKGKKFARYQLGDLLLHLEKKHGEDWGKVYDEAWERIDKKVEGLSKHIKLEEERRSEDAQSKAALTDWLRAKASFVIEGLKEADKDEFCRCELKLQKWYGDLRGKPFAIEAENSILDISGFSKQYNCAFIWQKDGVKKLNLYLIINYFKGGKLRFKKIKPEAFEANRFYTVINKKSGEIVPMEVNFNFDDPNLIILPLAFGKRFGREFIWNDLLSLETGSLKLANGRVIEKTLYNRRTRQDEPALFVALTFERREVLDSSNIKPMNLIGVDRGENIPAVIALTDPEGCPLSRFKDSLGNPTHILRIGESYKEKQRTIQAKKEVEQRRAGGYSRKYASKAKNLADDMVRNTARDLLYYAVTQDAMLIFENLSRGFGRQGKRTFMAERQYTRMEDWLTAKLAYEGLPSKTYLSKTLAQYTSKTCSNCGFTITSADYDRVLEKLKKTATGWMTTINGKELKVEGQITYYNRYKRQNVVKDLSVELDRLSEESVNNDISSWTKGRSGNEALSLLKKRFSHRPVQEKFVCLNCGFETHADEQAALNIARSWLFLRSQEYKKYQTNKTTGNTDKRAFVETWQSFYRKKLKEVWKPAV

SEQ ID NO: 49181 - protein, 978 aa, synthetic construct
  REGION 1..978: note = engineered CasX variant
QEIKRINKIRRRLVKDSNTKKAGKTGPMKTLLVRVMTPDLRERLENLRKKPENIPQPISNTSRANLNKLLTDYTEMKKAILHVYWEEFQKDPVGLMSRVAQPASKKIDQNKLKPEMDEKGNLTTAGFACSQCGQPLFVYKLEQVSEKGKAYTNYFGRCNVAEHEKLILLAQLKPEKDSDEAVTYSLGKFGQRALDFYSIHVTKESTHPVKPLAQIAGNRYASGPVGKALRDACMGTIASFLSKYQDIIIEHQKVVKGNQKRLESLRELAGKENLEYPSVTLPPQPHTKEGVDAYNEVIARVRMWVNLNLWQKLKLSRDDAKPLLRLKGFPSFPLVERQANEVDWWDMVCNVKKLINEKKEDGKVFWQNLAGYKRQEALRPYLSSEEDRQKGKKFARYQLGDLLLHLEKKHGEDWGKVYDEAWERIDKKVEGLSKHIKLEEERRSEDAQSKAALTDWLRAKASFVIEGLKEADKDEFCRCELKLQKWYGDLRGKPFAIEAENSILDISGFSKQYNCAFIWQKDGVKKLNLYLIINYFKGGKLRFKKIKPEAFEANRFYTVINKKSGEIVPMEVNFNFDDPNLIILPLAFGKRFGREFIWNDLLSLETGSLKLANGRVIEKTLYNRRTRQDEPALFVALTFERREVLDSSNIKPMNLIGVDRGENIPAVIALTDPEGCPLSRFKDSLGNPTHILRIGESYKEKQRTIQAKKEVEQRRAGGYSRKYASKAKNLADDMVRNTARDLLYYAVTQDAMLIFENLSRGFGRQGKRTFMAERQYTRMEDWLTAKLAYEGLPSKTYLSKTLAQYTSKTCSNCGFTITSADYDRVLEKLKKTATGWMTTINGKELKVEGQITYYNRYKRQNVVKDLSVELDRLSEESVNNDISSWTKGRSGEALSLLKKRFSHRPVQEKFVCLNCGFETHADEQAALNIARSWLFLRSQEYKKYQTNKTTGNTDKRAFVETWQSFYRKKLKEVWKPAV

SEQ ID NO: 49182 - protein, 978 aa, synthetic construct
  REGION 1..978: note = engineered CasX variant
QEIKRINKIRRRLVKDSNTKKAGKTGPMKTLLVRVMTPDLRERLENLRKKPENIPQPISNTSRANLNKLLTDYTEMKKAILHVYWEEFQKDPVGLMSRVAQPASKKIDQNKLKPEMDEKGNLTTAGFACSQCGQPLFVYKLEQVSEKGKAYTNYFGRCNVAEHEKLILLAQLKPEKDSDEAVTYSLGKFGQRALDFYSIHVTKESTHPVKPLAQIAGNRYASGPVGKALRDACMGTIASFLSKYQDIIIEHQKVVKGNQKRLESLRELAGKENLEYPSVTLPPQPHTKEGVDAYNEVIARVRMWVNLNLWQKLKLSRDDAKPLLRLKGFPSFPLVERQANEVDWWDMVCNVKKLINEKKEDGKVFWQNLAGYKRQEALRPYLSSEEDRKKGKKFARYQLGDLLLHLEKKHGEDWGKVYDEAWERIDKKVEGLSKHIKLEEERRSEDAQSKAALTDWLRAKASFVIEGLKEADKDEFCRCELKLQKWYGDLRGKPFAIEAENSILDISGFSKQYNCAFIWQKDGVKKLNLYLIINYFKGGKLRFKKIKPEAFEANRFYTVINKKSGEIVPMEVNFNFDDPNLIILPLAFGKRFGREFIWNDLLSLETGSLKLANGRVIEKTLYNRRTRQDEPALFVALTFERREVLDSSNIKPMNLIGVDRGENIPAVIALTDPEGCPLSRFKDSLGNPTHILRIGESYKEKQRTIQAKKEVEQRRAGGYSRKYASKAKNLADDMVRNTARDLLYYAVTQDAMLIFENLSRGFGRQGKRTFMAERQYTRMEDWLTAKLAYEGLPSQTYLSKTLAQYTSKTCSNCGFTITSADYDRVLEKLKKTATGWMTTINGKELKVEGQITYYNRYKRQNVVKDLSVELDRLSEESVNNDISSWTKGRSGEALSLLKKRFSHRPVQEKFVCLNCGFETHADEQAALNIARSWLFLRSQEYKKYQTNKTTGNTDKRAFVETWQSFYRKKLKEVWKPAV

SEQ ID NO: 49183 - protein, 978 aa, synthetic construct
  REGION 1..978: note = engineered CasX variant
QEIKRINKIRRRLVKDSNTKKAGKTGPMKTLLVRVMTPDLRERLENLRKKPENIPQPISNTSRANLNKLLTDYTEMKKAILHVYWEEFQKDPVGLMSRVAQPASKKIDQNKLKPEMDEKGNLTTAGFACSQCGQPLFVYKLEQVSEKGKAYTNYFGRCNVAEHEKLILLAQLKPEKDSDEAVTYSLGKFGQRALDFYSIHVTKESTHPVKPLAQIAGNRYASGPVGKALRDACMGTIASFLSKYQDIIIEHQKVVKGNQKRLESLRELAGKENLEYPSVTLPPQPHTKEGVDAYNEVIARVRMWVNLNLWQKLKLSRDDAKPLLRLKGFPSFPLVERQANEVDWWDMVCNVKKLINEKKEDGKVFWQNLAGYKRQEALRPYLSSEEDRKKGKKFARYQLGDLLLHLEKKHGEDWGKVYDEAWERIDKKVEGLSKHIKLEEERRSEDAQSKAALTDWLRAKASFVIEGLKEADKDEFCRCELKLQKWYGDLRGKPFAIEAENSILDISGFSKQYNCAFIWQKDGVKKLNLYLIINYFKGGKLRFKKIKPEAFEANRFYTVINKKSGEIVPMEVNFNFDDPNLIILPLAFGKRFGREFIWNDLLSLETGSLKLANGRVIEKTLYNRRTRQDEPALFVALTFERREVLDSSNIKPMNLIGVDRGENIPAVIALTDPEGCPLSRFKDSLGNPTHILRIGESYKEKQRTIQAKKEVEQRRAGGYSRKYASKAKNLADDMVRNTARDLLYYAVTQDAMLIFENLSRGFGRQGKRTFMAERQYTRMEDWLTAKLAYNGLPSKTYLSKTLAQYTSKTCSNCGFTITSADYDRVLEKLKKTATGWMTTINGKELKVEGQITYYNRYKRQNVVKDLSVELDRLSEESVNNDISSWTKGRSGEALSLLKKRFSHRPVQEKFVCLNCGFETHADEQAALNIARSWLFLRSQEYKKYQTNKTTGNTDKRAFVETWQSFYRKKLKEVWKPAV

SEQ ID NO: 49184 - protein, 978 aa, synthetic construct
  REGION 1..978: note = engineered CasX variant
QEIKRINKIRRRLVKDSNTKKAGKTGPMKTLLVRVMTPDLRERLENLRKKPENIPQPISNTSRANLNKLLTDYTEMKKAILHVYWEEFQKDPVGLMSRVAQPASKKIDQNKLKPEMDEKGNLTTAGFACSQCGQPLFVYKLEQVSEKGKAYTNYFGRCNVAEHEKLIQLAQLKPEKDSDEAVTYSLGKFGQRALDFYSIHVTKESTHPVKPLAQIAGNRYASGPVGKALRDACMGTIASFLSKYQDIIIEHQKVVKGNQKRLESLRELAGKENLEYPSVTLPPQPHTKEGVDAYNEVIARVRMWVNLNLWQKLKLSRDDAKPLLRLKGFPSFPLVERQANEVDWWDMVCNVKKLINEKKEDGKVFWQNLAGYKRQEALRPYLSSEEDRKKGKKFARYQLGDLLLHLEKKHGEDWGKVYDEAWERIDKKVEGLSKHIKLEEERRSEDAQSKAALTDWLRAKASFVIEGLKEADKDEFCRCELKLQKWYGDLRGKPFAIEAENSILDISGFSKQYNCAFIWQKDGVKKLNLYLIINYFKGGKLRFKKIKPEAFEANRFYTVINKKSGEIVPMEVNFNFDDPNLIILPLAFGKRFGREFIWNDLLSLETGSLKLANGRVIEKTLYNRRTRQDEPALFVALTFERREVLDSSNIKPMNLIGVDRGENIPAVIALTDPEGCPLSRFKDSLGNPTHILRIGESYKEKQRTIQAKKEVEQRRAGGYSRKYASKAKNLADDMVRNTARDLLYYAVTQDAMLIFENLSRGFGRQGKRTFMAERQYTRMEDWLTAKLAYEGLPSKTYLSKTLAQYTSKTCSNCGFTITSADYDRVLEKLKKTATGWMTTINGKELKVEGQITYYNRYKRQNVVKDLSVELDRLSEESVNNDISSWTKGRSGEALSLLKKRFSHRPVQEKFVCLNCGFETHADEQAALNIARSWLFLRSQEYKKYQTNKTTGNTDKRAFVETWQSFYRKKLKEVWKPAV

SEQ ID NO: 49185 - protein, 978 aa, synthetic construct
  REGION 1..978: note = engineered CasX variant
QEIKRINKIRRRLVKDSNTKKAGKTGPMKTLLVRVMTPDLRERLENLRKKPENIPQPISNTSRANLNKLLTDYTEMKKAILHVYWEEFQKDPVGLMSRVAQPASKKIDQNKLKPEMDEKGNLTTAGFACSQCGQPLFVYKLEQVSEKGKAYTNYFGRCNVAEHEKLILLAQLKPEKDSDEAVTYSLGKFGQRALDFYSIHVTKESTHPVKPLAQIAGNRYASGPVGKALRDACMGTIASFLSKYQDIIIEHQKVVKGNQKRLESLRELAGKENLEYPSVTLPPQPHTKEGVDAYNEVIARVRMWVNLNLWQKLKLSRDDAKPLLRLKGFPSFPLVERQANEVDWWDMVCNVKKLINEKKEDGKVFWQNLAIYKRQEALRPYLSSEEDRKKGKKFARYQLGDLLLHLEKKHGEDWGKVYDEAWERIDKKVEGLSKHIKLEEERRSEDAQSKAALTDWLRAKASFVIEGLKEADKDEFCRCELKLQKWYGDLRGKPFAIEAENSILDISGFSKQYNCAFIWQKDGVKKLNLYLIINYFKGGKLRFKKIKPEAFEANRFYTVINKKSGEIVPMEVNFNFDDPNLIILPLAFGKRFGREFIWNDLLSLETGSLKLANGRVIEKTLYNRRTRQDEPALFVALTFERREVLDSSNIKPMNLIGVDRGENIPAVIALTDPEGCPLSRFKDSLGNPTHILRIGESYKEKQRTIQAKKEVEQRRAGGYSRKYASKAKNLADDMVRNTARDLLYYAVTQDAMLIFENLSRGFGRQGKRTFMAERQYTRMEDWLTAKLAYEGLPSKTYLSKTLAQYTSKTCSNCGFTITSADYDRVLEKLKKTATGWMTTINGKELKVEGQITYYNRYKRQNVVKDLSVELDRLSEESVNNDISSWTKGRSGEALSLLKKRFSHRPVQEKFVCLNCGFETHADEQAALNIARSWLFLRSQEYKKYQTNKTTGNTDKRAFVETWQSFYRKKLKEVWKPAV

SEQ ID NO: 49186 - protein, 978 aa, synthetic construct
  REGION 1..978: note = engineered CasX variant
QEIKRINKIRRRLVKDSNTKKAGKTGPMKTLLVRVMTPDLRERLENLRKKPENIPQPISNTSRANLNKLLTDYTEMKKAILHVYWEEFQKDPVGLMSRVAQPASKKIDQNKLKPEMDEKGNLTTAGFACSQCGQPLFVYKLEQVSEKGKAYTNYFGRCNVAEHEKLILLAQLKPEKDSDEAVTYSLGKFGQRALDFYSIHVTKESTHPVKPLAQIAGNRYASGPVGKALRDACMGTIASFLSKYQDIIIEHQKVVKGNQKRLESLRELAGKENLEYPSVTLPPQPHTKEGVDAYNEVIARVRMWVNLNLWQKLKLSRDDAKPLLRLKGFPSFPLVERQANEVDWWDMVCNVKKLINEKKEDGKVFWQNLAGYKRQEALRPYLSSEEDREKGKKFARYQLGDLLLHLEKKHGEDWGKVYDEAWERIDKKVEGLSKHIKLEEERRSEDAQSKAALTDWLRAKASFVIEGLKEADKDEFCRCELKLQKWYGDLRGKPFAIEAENSILDISGFSKQYNCAFIWQKDGVKKLNLYLIINYFKGGKLRFKKIKPEAFEANRFYTVINKKSGEIVPMEVNFNFDDPNLIILPLAFGKRFGREFIWNDLLSLETGSLKLANGRVIEKTLYNRRTRQDEPALFVALTFERREVLDSSNIKPMNLIGVDRGENIPAVIALTDPEGCPLSRFKDSLGNPTHILRIGESYKEKQRTIQAKKEVEQRRAGGYSRKYASKAKNLADDMVRNTARDLLYYAVTQDAMLIFENLSRGFGRQGKRTFMAERQYTRMEDWLTAKLAYEGLPSKTYLSKTLAQYTSKTCSNCGFTITSADYDRVLEKLKKTATGWMTTINGKELKVEGQITYYNRYKRQNVVKDLSVELDRLSEESVNNDISSWTKGRSGEALSLLKKRFSHRPVQEKFVCLNCGFETHADEQAALNIARSWLFLRSQEYKKYQTNKTTGNTDKRAFVETWQSFYRKKLKEVWKPAV

SEQ ID NO: 49187 - protein, 978 aa, synthetic construct
  REGION 1..978: note = engineered CasX variant
QEIKRINKIRRRLVKDSNTKKAGKTGPMKTLLVRVMTPDLRERLENLRKKPENIPQPISNTSRANLNKLLTDYTEMKKAILHVYWEEFQKDPVGLMSRVAQPASKKIDQNKLKPEMDEKGNLTTAGFACSQCGQPLFVYKLEQVSEKGKAYTNYFGRCNVAEHEKLILLAQLKPEKDSDEAVTYSLGKFGQRALDFYSIHVTKESTHPVKPLAQIAGNRYASGPVGKALRDACMGTIASFLSKYQDIIIEHQKVVKGNQKRLESLRELAGKENLEYPSVTLPPQPHTKEGVDAYNEVIARVRMWVNLNLWQKLKLSRDDAKPLLRLKGFPSFPLVERQANEVDWWDMVCNVKKLINEKKEDGKVFWQNLAGYKRQEALRPYLSSEEDRKKGKKFARYQLGDLLLHLEKKHGEDWGKVYDEAWERIDKKVEGLSKHIKLEEERRSEDAQSKAALTDWLRAKASFVIEGLKEADKDEFCRCELKLQKWYGDLRGKPFAIEAENSILDISGFSKQYNCAFIWQKDGVKKLNLYLIINYFKGGKLRFKKIKPEAFEANRFYTVINKKSGEIVIMEVNFNFDDPNLIILPLAFGKRFGREFIWNDLLSLETGSLKLANGRVIEKTLYNRRTRQDEPALFVALTFERREVLDSSNIKPMNLIGVDRGENIPAVIALTDPEGCPLSRFKDSLGNPTHILRIGESYKEKQRTIQAKKEVEQRRAGGYSRKYASKAKNLADDMVRNTARDLLYYAVTQDAMLIFENLSRGFGRQGKRTFMAERQYTRMEDWLTAKLAYEGLPSKTYLSKTLAQYTSKTCSNCGFTITSADYDRVLEKLKKTATGWMTTINGKELKVEGQITYYNRYKRQNVVKDLSVELDRLSEESVNNDISSWTKGRSGEALSLLKKRFSHRPVQEKFVCLNCGFETHADEQAALNIARSWLFLRSQEYKKYQTNKTTGNTDKRAFVETWQSFYRKKLKEVWKPAV

SEQ ID NO: 49188 - protein, 978 aa, synthetic construct
  REGION 1..978: note = engineered CasX variant
QEIKRINKIRRRLVKDSNTKKAGKTGPMKTLLVRVMTPDLRERLENLRKKPENIPQPISNTSRANLNKLLTDYTEMKKAILHVYWEEFQKDPVGLMSRVAQPASKKIDQNKLKPEMDEKGNLTTAGFACSQCGQPLFVYKLEQVSEKGKAYTNYFGRCNVAEHEKLILLAQLKPEKDSDEAVTYSLGKFGQRALDFYSIHVTKESTHPVKPLAQIAGNRYASGPVGKALRGACMGTIASFLSKYQDIIIEHQKVVKGNQKRLESLRELAGKENLEYPSVTLPPQPHTKEGVDAYNEVIARVRMWVNLNLWQKLKLSRDDAKPLLRLKGFPSFPLVERQANEVDWWDMVCNVKKLINEKKEDGKVFWQNLAGYKRQEALRPYLSSEEDRKKGKKFARYQLGDLLLHLEKKHGEDWGKVYDEAWERIDKKVEGLSKHIKLEEERRSEDAQSKAALTDWLRAKASFVIEGLKEADKDEFCRCELKLQKWYGDLRGKPFAIEAENSILDISGFSKQYNCAFIWQKDGVKKLNLYLIINYFKGGKLRFKKIKPEAFEANRFYTVINKKSGEIVPMEVNFNFDDPNLIILPLAFGKRVGREFIWNDLLSLETGSLKLANGRVIEKTLYNRRTRQDEPALFVALTFERREVLDSSNIKPMNLIGVDRGENIPAVIALTDPEGCPLSRFKDSLGNPTHILRIGESYKEKQRTIQAKKEVEQRRAGGYSRKYASKAKNLADDMVRNTARDLLYYAVTQDAMLIFENLSRGFGRQGKRTFMAERQYTRMEDWLTAKLAYEGLPSKTYLSKTLAQYTSKTCSNCGFTITSADYDRVLEKLKKTATGWMTTINGKELKVEGQITYYNRYKRQNVVKDLSVELDRLSEESVNNDISSWTKGRSGEALSLLKKRFSHRPVQEKFVCLNCGFETHADEQAALNIARSWLFLRSQEYKKYQTNKTTGNTDKRAFVETWQSFYRKKLKEVWKPAV

SEQ ID NO: 49189 - protein, 978 aa, synthetic construct
  REGION 1..978: note = engineered CasX variant
QEIKRINKIRRRLVKDSNTKKAGKTGPMKTLLVRVMTPDLRERLENLRKKPENIPQPISNTSRANLNKLLTDYTEMKKAILHVYWEEFQKDPVGLMSRVAQPASKKIDQNKLKPEMDEKGNLTTAGFACSQCGQPLFVYKLEQVSEKGKAYTNYFGRCNVAEHEKLILLAQLKPEKDSDEAVTYSLGKFGQRALDFYSIHVTKESTHPVKPLAQIAGNRYASGPVGKALRDACMGTIASFLSKYQDIIIEHQKVVKGNQKRLESLRELAGKENLEYPSVTLPPQPHTKEGVDAYNEVIARVRMWVNLNLWQKLKLSRDDAKPLLRLKNFPSFPLVERQANEVDWWDMVCNVKKLINEKKEDGKVFWQNLAGYKRQEALRPYLSSEEDRKKGKKFARYQLGDLLLHLEKKHGEDWGKVYDEAWERIDKKVEGLSKHIKLEEERRSEDAQSKAALTDWLRAKASFVIEGLKEADKDEFCRCELKLQKWYGDLRGKPFAIEAENSILDISGFSKQYNCAFIWQKDGVKKLNLYLIINYFKGGKLRFKKIKPEAFEANRFYTVINKKSGEIVPMEVNFNFDDPNLIILPLAFGKRVGREFIWNDLLSLETGSLKLANGRVIEKTLYNRRTRQDEPALFVALTFERREVLDSSNIKPMNLIGVDRGENIPAVIALTDPEGCPLSRFKDSLGNPTHILRIGESYKEKQRTIQAKKEVEQRRAGGYSRKYASKAKNLADDMVRNTARDLLYYAVTQDAMLIFENLSRGFGRQGKRTFMAERQYTRMEDWLTAKLAYEGLPSKTYLSKTLAQYTSKTCSNCGFTITSADYDRVLEKLKKTATGWMTTINGKELKVEGQITYYNRYKRQNVVKDLSVELDRLSEESVNNDISSWTKGRSGEALSLLKKRFSHRPVQEKFVCLNCGFETHADEQAALNIARSWLFLRSQEYKKYQTNKTTGNTDKRAFVETWQSFYRKKLKEVWKPAV

SEQ ID NO: 49190 - protein, 978 aa, synthetic construct
  REGION 1..978: note = engineered CasX variant
QEIKRINKIRRRLVKDSNTKKAGKTGPMKTLLVRVMTPDLRERLENLRKKPENIPQPISNTSRANLNKLLTDYTEMKKAILHVYWEEFQKDPVGLMSRVAQPASKKIDQNKLKPEMDEKGNLTTAGFACSQCGQPLFVYKLEQVSEKGKAYTNYFGRCNVAEHEKLILLAQLKPEKDSDEAVTYSLGKFGQRALDFYSIHVTKESTHPVKPLAQIAGNRYASGPVGKALRDACMGTIASFLSKYQDIIIEHQKVVKGNQKRLESLRELAGKENLEYPSVTLPPQPHTKEGVDAYNEVIARVRMWVNLNLWQKLKLSRDDAKPLLRLKGFPSFPLVERQANEVDWWDMVCNVKKLINEKKEDGKVFWQNLAGYKRQEALRPYLSSEEDRKKGKKFARYQLGDLLNHLEKKHGEDWGKVYDEAWERIDKKVEGLSKHIKLEEERRSEDAQSKAALTDWLRAKASFVIEGLKEADKDEFCRCELKLQKWYGDLRGKPFAIEAENSILDISGFSKQYNCAFIWQKDGVKKLNLYLIINYFKGGKLRFKKIKPEAFEANRFYTVINKKSGEIVPMEVNFNFDDPNLIILPLAFGKRVGREFIWNDLLSLETGSLKLANGRVIEKTLYNRRTRQDEPALFVALTFERREVLDSSNIKPMNLIGVDRGENIPAVIALTDPEGCPLSRFKDSLGNPTHILRIGESYKEKQRTIQAKKEVEQRRAGGYSRKYASKAKNLADDMVRNTARDLLYYAVTQDAMLIFENLSRGFGRQGKRTFMAERQYTRMEDWLTAKLAYEGLPSKTYLSKTLAQYTSKTCSNCGFTITSADYDRVLEKLKKTATGWMTTINGKELKVEGQITYYNRYKRQNVVKDLSVELDRLSEESVNNDISSWTKGRSGEALSLLKKRFSHRPVQEKFVCLNCGFETHADEQAALNIARSWLFLRSQEYKKYQTNKTTGNTDKRAFVETWQSFYRKKLKEVWKPAV

SEQ ID NO: 49191 - protein, 978 aa, synthetic construct
  REGION 1..978: note = engineered CasX variant
QEIKRINKIRRRLVKDSNTKKAGKTGPMKTLLVRVMTPDLRERLENLRKKPENIPQPISNTSRANLNKLLTDYTEMKKAILHVYWEEFQKDPVGLMSRVAQPASKKIDQNKLKPEMDEKGNLTTAGFACSQCGQPLFVYKLEQVSEKGKAYTNYFGRCNVAEHEKLILLAQLKPEKDSDEAVTYSLGKFGQRALDFYSIHVTKESTHPVKPLAQIAGNRYASGPVGKALRDACMGTIASFLSKYQDIIIEHQKVVKGNQKRLESLRELAGKENLEYPSVTLPPQPHTKEGVDAYNEVIARVRMWVNLNLWQKLKLSRDDAKPLLRLKGFPSFPLVERQANEVDWWDMVCNVKKLINEKKEDGKVFWQNLAGYKRQEALRPYLSSEEDRKKGKKFARYQLGDLLWHLEKKHGEDWGKVYDEAWERIDKKVEGLSKHIKLEEERRSEDAQSKAALTDWLRAKASFVIEGLKEADKDEFCRCELKLQKWYGDLRGKPFAIEAENSILDISGFSKQYNCAFIWQKDGVKKLNLYLIINYFKGGKLRFKKIKPEAFEANRFYTVINKKSGEIVPMEVNFNFDDPNLIILPLAFGKRVGREFIWNDLLSLETGSLKLANGRVIEKTLYNRRTRQDEPALFVALTFERREVLDSSNIKPMNLIGVDRGENIPAVIALTDPEGCPLSRFKDSLGNPTHILRIGESYKEKQRTIQAKKEVEQRRAGGYSRKYASKAKNLADDMVRNTARDLLYYAVTQDAMLIFENLSRGFGRQGKRTFMAERQYTRMEDWLTAKLAYEGLPSKTYLSKTLAQYTSKTCSNCGFTITSADYDRVLEKLKKTATGWMTTINGKELKVEGQITYYNRYKRQNVVKDLSVELDRLSEESVNNDISSWTKGRSGEALSLLKKRFSHRPVQEKFVCLNCGFETHADEQAALNIARSWLFLRSQEYKKYQTNKTTGNTDKRAFVETWQSFYRKKLKEVWKPAV

SEQ ID NO: 49192 - protein, 978 aa, synthetic construct
  REGION 1..978: note = engineered CasX variant
QEIKRINKIRRRLVKDSNTKKAGKTGPMKTLLVRVMTPDLRERLENLRKKPENIPQPISNTSRANLNKLLTDYTEMKKAILHVYWEEFQKDPVGLMSRVAQPASKKIDQNKLKPEMDEKGNLTTAGFACSQCGQPLFVYKLEQVSEKGKAYTNYFGRCNVAEHEKLILLAQLKPEKDSDEAVTYSLGKFGQRALDFYSIHVTKESTHPVKPLAQIAGNRYASGPVGKALRDACMGTIASFLSKYQDIIIEHQKVVKGNQKRLESLRELAGKENLEYPSVTLPPQPHTKEGVDAYNEVIARVRMWVNLNLWQKLKLSRDDAKPLLRLKGFPSFPLVERQANEVDWWDMVCNVKKLINEKKEDGKVFWQNLAGYKRQEALRPYLSSEEDRKKGKKFARYQLGDLLLHLYKKHGEDWGKVYDEAWERIDKKVEGLSKHIKLEEERRSEDAQSKAALTDWLRAKASFVIEGLKEADKDEFCRCELKLQKWYGDLRGKPFAIEAENSILDISGFSKQYNCAFIWQKDGVKKLNLYLIINYFKGGKLRFKKIKPEAFEANRFYTVINKKSGEIVPMEVNFNFDDPNLIILPLAFGKRVGREFIWNDLLSLETGSLKLANGRVIEKTLYNRRTRQDEPALFVALTFERREVLDSSNIKPMNLIGVDRGENIPAVIALTDPEGCPLSRFKDSLGNPTHILRIGESYKEKQRTIQAKKEVEQRRAGGYSRKYASKAKNLADDMVRNTARDLLYYAVTQDAMLIFENLSRGFGRQGKRTFMAERQYTRMEDWLTAKLAYEGLPSKTYLSKTLAQYTSKTCSNCGFTITSADYDRVLEKLKKTATGWMTTINGKELKVEGQITYYNRYKRQNVVKDLSVELDRLSEESVNNDISSWTKGRSGEALSLLKKRFSHRPVQEKFVCLNCGFETHADEQAALNIARSWLFLRSQEYKKYQTNKTTGNTDKRAFVETWQSFYRKKLKEVWKPAV

SEQ ID NO: 49193 - protein, 978 aa, synthetic construct
  REGION 1..978: note = engineered CasX variant
QEIKRINKIRRRLVKDSNTKKAGKTGPMKTLLVRVMTPDLRERLENLRKKPENIPQPISNTSRANLNKLLTDYTEMKKAILHVYWEEFQKDPVGLMSRVAQPASKKIDQNKLKPEMDEKGNLTTAGFACSQCGQPLFVYKLEQVSEKGKAYTNYFGRCNVAEHEKLILLAQLKPEKDSDEAVTYSLGKFGQRALDFYSIHVTKESTHPVKPLAQIAGNRYASGPVGKALRDACMGTIASFLSKYQDIIIEHQKVVKGNQKRLESLRELAGKENLEYPSVTLPPQPHTKEGVDAYNEVIARVRMWVNLNLWQKLKLSRDDAKPLLRLKGFPSFPLVERQANEVDWWDMVCNVKKLINEKKEDGKVFWQNLAGYKRQEALRPYLSSEEDRKKGKKFARYQLGDLLLHLEKKHPEDWGKVYDEAWERIDKKVEGLSKHIKLEEERRSEDAQSKAALTDWLRAKASFVIEGLKEADKDEFCRCELKLQKWYGDLRGKPFAIEAENSILDISGFSKQYNCAFIWQKDGVKKLNLYLIINYFKGGKLRFKKIKPEAFEANRFYTVINKKSGEIVPMEVNFNFDDPNLIILPLAFGKRVGREFIWNDLLSLETGSLKLANGRVIEKTLYNRRTRQDEPALFVALTFERREVLDSSNIKPMNLIGVDRGENIPAVIALTDPEGCPLSRFKDSLGNPTHILRIGESYKEKQRTIQAKKEVEQRRAGGYSRKYASKAKNLADDMVRNTARDLLYYAVTQDAMLIFENLSRGFGRQGKRTFMAERQYTRMEDWLTAKLAYEGLPSKTYLSKTLAQYTSKTCSNCGFTITSADYDRVLEKLKKTATGWMTTINGKELKVEGQITYYNRYKRQNVVKDLSVELDRLSEESVNNDISSWTKGRSGEALSLLKKRFSHRPVQEKFVCLNCGFETHADEQAALNIARSWLFLRSQEYKKYQTNKTTGNTDKRAFVETWQSFYRKKLKEVWKPAV

SEQ ID NO: 49194 - protein, 979 aa, synthetic construct
  REGION 1..979: note = engineered CasX variant
QEIKRINKIRRRLVKDSNTKKAGKTGPMKTLLVRVMTPDLRERLENLRKKPENIPQPISNTSRANLNKLLTDYTEMKKAILHVYWEEFQKDPVGLMSRVAQPASKKIDQNKLKPEMDEKGNLTTAGFACSQCGQPLFVYKLEQVSEKGKAYTNYFGRCNVAEHEKLILLAQLKPEKDSDEAVTYSLGKFGQRALDFYSIHVTKESTHPVKPLAQIAGNRYASGPVGKALRDACMGTIASFLSKYQDIIIEHQKVVKGNQKRLESLRELAGKENLEYPSVTLPPQPHTKEGVDAYNEVIARVRMWVNLNLWQKLKLSRDDAKPLLRLKGFPSFPLVERQANEVDWWDMVCNVKKLINEKKEDGKVFWQNLAGYKRQEALRPYLSSEEDRKKGKKFARYQLGDLLLHLEKKHGERDWGKVYDEAWERIDKKVEGLSKHIKLEEERRSEDAQSKAALTDWLRAKASFVIEGLKEADKDEFCRCELKLQKWYGDLRGKPFAIEAENSILDISGFSKQYNCAFIWQKDGVKKLNLYLIINYFKGGKLRFKKIKPEAFEANRFYTVINKKSGEIVPMEVNFNFDDPNLIILPLAFGKRVGREFIWNDLLSLETGSLKLANGRVIEKTLYNRRTRQDEPALFVALTFERREVLDSSNIKPMNLIGVDRGENIPAVIALTDPEGCPLSRFKDSLGNPTHILRIGESYKEKQRTIQAKKEVEQRRAGGYSRKYASKAKNLADDMVRNTARDLLYYAVTQDAMLIFENLSRGFGRQGKRTFMAERQYTRMEDWLTAKLAYEGLPSKTYLSKTLAQYTSKTCSNCGFTITSADYDRVLEKLKKTATGWMTTINGKELKVEGQITYYNRYKRQNVVKDLSVELDRLSEESVNNDISSWTKGRSGEALSLLKKRFSHRPVQEKFVCLNCGFETHADEQAALNIARSWLFLRSQEYKKYQTNKTTGNTDKRAFVETWQSFYRKKLKEVWKPAV

SEQ ID NO: 49195 - protein, 979 aa, synthetic construct
  REGION 1..979: note = engineered CasX variant
QEIKRINKIRRRLVKDSNTKKAGKTGPMKTLLVRVMTPDLRERLENLRKKPENIPQPISNTSRANLNKLLTDYTEMKKAILHVYWEEFQKDPVGLMSRVAQPASKKIDQNKLKPEMDEKGNLTTAGFACSQCGQPLFVYKLEQVSEKGKAYTNYFGRCNVAEHEKLILLAQLKPEKDSDEAVTYSLGKFGQRALDFYSIHVTKESTHPVKPLAQIAGNRYASGPVGKALRDACMGTIASFLSKYQDIIIEHQKVVKGNQKRLESLRELAGKENLEYPSVTLPPQPHTKEGVDAYNEVIARVRMWVNLNLWQKLKLSRDDAKPLLRLKGFPSFPLVERQANEVDWWDMVCNVKKLINEKKEDGKVFWQNLAGYKRQEALRPYLSSEEDRKKGKKFARYQLGDLLLHLEKKHGEYDWGKVYDEAWERIDKKVEGLSKHIKLEEERRSEDAQSKAALTDWLRAKASFVIEGLKEADKDEFCRCELKLQKWYGDLRGKPFAIEAENSILDISGFSKQYNCAFIWQKDGVKKLNLYLIINYFKGGKLRFKKIKPEAFEANRFYTVINKKSGEIVPMEVNFNFDDPNLIILPLAFGKRVGREFIWNDLLSLETGSLKLANGRVIEKTLYNRRTRQDEPALFVALTFERREVLDSSNIKPMNLIGVDRGENIPAVIALTDPEGCPLSRFKDSLGNPTHILRIGESYKEKQRTIQAKKEVEQRRAGGYSRKYASKAKNLADDMVRNTARDLLYYAVTQDAMLIFENLSRGFGRQGKRTFMAERQYTRMEDWLTAKLAYEGLPSKTYLSKTLAQYTSKTCSNCGFTITSADYDRVLEKLKKTATGWMTTINGKELKVEGQITYYNRYKRQNVVKDLSVELDRLSEESVNNDISSWTKGRSGEALSLLKKRFSHRPVQEKFVCLNCGFETHADEQAALNIARSWLFLRSQEYKKYQTNKTTGNTDKRAFVETWQSFYRKKLKEVWKPAV

SEQ ID NO: 49196 - protein, 978 aa, synthetic construct
  REGION 1..978: note = engineered CasX variant
QEIKRINKIRRRLVKDSNTKKAGKTGPMKTLLVRVMTPDLRERLENLRKKPENIPQPISNTSRANLNKLLTDYTEMKKAILHVYWEEFQKDPVGLMSRVAQPASKKIDQNKLKPEMDEKGNLTTAGFACSQCGQPLFVYKLEQVSEKGKAYTNYFGRCNVAEHEKLILLAQLKPEKDSDEAVTYSLGKFGQRALDFYSIHVTKESTHPVKPLAQIAGNRYASGPVGKALRDACMGTIASFLSKYQDIIIEHQKVVKGNQKRLESLRELAGKENLEYPSVTLPPQPHTKEGVDAYNEVIARVRMWVNLNLWQKLKLSRDDAKPLLRLKGFPSFPLVERQANEVDWWDMVCNVKKLINEKKEDGKVFWQNLAGYKRQEALRPYLSSEEDRKKGKKFARYQLGDLLLHLEKKHGEDWGDVYDEAWERIDKKVEGLSKHIKLEEERRSEDAQSKAALTDWLRAKASFVIEGLKEADKDEFCRCELKLQKWYGDLRGKPFAIEAENSILDISGFSKQYNCAFIWQKDGVKKLNLYLIINYFKGGKLRFKKIKPEAFEANRFYTVINKKSGEIVPMEVNFNFDDPNLIILPLAFGKRVGREFIWNDLLSLETGSLKLANGRVIEKTLYNRRTRQDEPALFVALTFERREVLDSSNIKPMNLIGVDRGENIPAVIALTDPEGCPLSRFKDSLGNPTHILRIGESYKEKQRTIQAKKEVEQRRAGGYSRKYASKAKNLADDMVRNTARDLLYYAVTQDAMLIFENLSRGFGRQGKRTFMAERQYTRMEDWLTAKLAYEGLPSKTYLSKTLAQYTSKTCSNCGFTITSADYDRVLEKLKKTATGWMTTINGKELKVEGQITYYNRYKRQNVVKDLSVELDRLSEESVNNDISSWTKGRSGEALSLLKKRFSHRPVQEKFVCLNCGFETHADEQAALNIARSWLFLRSQEYKKYQTNKTTGNTDKRAFVETWQSFYRKKLKEVWKPAV

SEQ ID NO: 49197 - protein, 978 aa, synthetic construct
  REGION 1..978: note = engineered CasX variant
QEIKRINKIRRRLVKDSNTKKAGKTGPMKTLLVRVMTPDLRERLENLRKKPENIPQPISNTSRANLNKLLTDYTEMKKAILHVYWEEFQKDPVGLMSRVAQPASKKIDQNKLKPEMDEKGNLTTAGFACSQCGQPLFVYKLEQVSEKGKAYTNYFGRCNVAEHEKLILLAQLKPEKDSDEAVTYSLGKFGQRALDFYSIHVTKESTHPVKPLAQIAGNRYASGPVGKALRDACMGTIASFLSKYQDIIIEHQKVVKGNQKRLESLRELAGKENLEYPSVTLPPQPHTKEGVDAYNEVIARVRMWVNLNLWQKLKLSRDDAKPLLRLKGFPSFPLVERQANEVDWWDMVCNVKKLINEKKEDGKVFWQNLAGYKRQEALRPYLSSEEDRKKGKKFARYQLGDLLLHLEKKHGEDWGKVYGEAWERIDKKVEGLSKHIKLEEERRSEDAQSKAALTDWLRAKASFVIEGLKEADKDEFCRCELKLQKWYGDLRGKPFAIEAENSILDISGFSKQYNCAFIWQKDGVKKLNLYLIINYFKGGKLRFKKIKPEAFEANRFYTVINKKSGEIVPMEVNFNFDDPNLIILPLAFGKRVGREFIWNDLLSLETGSLKLANGRVIEKTLYNRRTRQDEPALFVALTFERREVLDSSNIKPMNLIGVDRGENIPAVIALTDPEGCPLSRFKDSLGNPTHILRIGESYKEKQRTIQAKKEVEQRRAGGYSRKYASKAKNLADDMVRNTARDLLYYAVTQDAMLIFENLSRGFGRQGKRTFMAERQYTRMEDWLTAKLAYEGLPSKTYLSKTLAQYTSKTCSNCGFTITSADYDRVLEKLKKTATGWMTTINGKELKVEGQITYYNRYKRQNVVKDLSVELDRLSEESVNNDISSWTKGRSGEALSLLKKRFSHRPVQEKFVCLNCGFETHADEQAALNIARSWLFLRSQEYKKYQTNKTTGNTDKRAFVETWQSFYRKKLKEVWKPAV

SEQ ID NO: 49198 - protein, 978 aa, synthetic construct
  REGION 1..978: note = engineered CasX variant
QEIKRINKIRRRLVKDSNTKKAGKTGPMKTLLVRVMTPDLRERLENLRKKPENIPQPISNTSRANLNKLLTDYTEMKKAILHVYWEEFQKDPVGLMSRVAQPASKKIDQNKLKPEMDEKGNLTTAGFACSQCGQPLFVYKLEQVSEKGKAYTNYFGRCNVAEHEKLILLAQLKPEKDSDEAVTYSLGKFGQRALDFYSIHVTKESTHPVKPLAQIAGNRYASGPVGKALRDACMGTIASFLSKYQDIIIEHQKVVKGNQKRLESLRELAGKENLEYPSVTLPPQPHTKEGVDAYNEVIARVRMWVNLNLWQKLKLSRDDAKPLLRLKGFPSFPLVERQANEVDWWDMVCNVKKLINEKKEDGKVFWQNLAGYKRQEALRPYLSSEEDRKKGKKFARYQLGDLLLHLEKKHGEDWGKVYDEAWERIDKKVEGLSKHIKLEEERRSEDAQSKAALTDWLRAKASFVIEGKKEADKDEFCRCELKLQKWYGDLRGKPFAIEAENSILDISGFSKQYNCAFIWQKDGVKKLNLYLIINYFKGGKLRFKKIKPEAFEANRFYTVINKKSGEIVPMEVNFNFDDPNLIILPLAFGKRVGREFIWNDLLSLETGSLKLANGRVIEKTLYNRRTRQDEPALFVALTFERREVLDSSNIKPMNLIGVDRGENIPAVIALTDPEGCPLSRFKDSLGNPTHILRIGESYKEKQRTIQAKKEVEQRRAGGYSRKYASKAKNLADDMVRNTARDLLYYAVTQDAMLIFENLSRGFGRQGKRTFMAERQYTRMEDWLTAKLAYEGLPSKTYLSKTLAQYTSKTCSNCGFTITSADYDRVLEKLKKTATGWMTTINGKELKVEGQITYYNRYKRQNVVKDLSVELDRLSEESVNNDISSWTKGRSGEALSLLKKRFSHRPVQEKFVCLNCGFETHADEQAALNIARSWLFLRSQEYKKYQTNKTTGNTDKRAFVETWQSFYRKKLKEVWKPAV

SEQ ID NO: 49199 - protein, 978 aa, synthetic construct
  REGION 1..978: note = engineered CasX variant
QEIKRINKIRRRLVKDSNTKKAGKTGPMKTLLVRVMTPDLRERLENLRKKPENIPQPISNTSRANLNKLLTDYTEMKKAILHVYWEEFQKDPVGLMSRVAQPASKKIDQNKLKPEMDEKGNLTTAGFACSQCGQPLFVYKLEQVSEKGKAYTNYFGRCNVAEHEKLILLAQLKPEKDSDEAVTYSLGKFGQRALDFYSIHVTKESTHPVKPLAQIAGNRYASGPVGKALRDACMGTIASFLSKYQDIIIEHQKVVKGNQKRLESLRELAGKENLEYPSVTLPPQPHTKEGVDAYNEVIARVRMWVNLNLWQKLKLSRDDAKPLLRLKGFPSFPLVERQANEVDWWDMVCNVKKLINEKKEDGKVFWQNLAGYKRQEALRPYLSSEEDRKKGKKFARYQLGDLLLHLEKKHGEDWGKVYDEAWERIDKKVEGLSKHIKLEEERRSEDAQSKAALTDWLRAKASFVIEGSKEADKDEFCRCELKLQKWYGDLRGKPFAIEAENSILDISGFSKQYNCAFIWQKDGVKKLNLYLIINYFKGGKLRFKKIKPEAFEANRFYTVINKKSGEIVPMEVNFNFDDPNLIILPLAFGKRVGREFIWNDLLSLETGSLKLANGRVIEKTLYNRRTRQDEPALFVALTFERREVLDSSNIKPMNLIGVDRGENIPAVIALTDPEGCPLSRFKDSLGNPTHILRIGESYKEKQRTIQAKKEVEQRRAGGYSRKYASKAKNLADDMVRNTARDLLYYAVTQDAMLIFENLSRGFGRQGKRTFMAERQYTRMEDWLTAKLAYEGLPSKTYLSKTLAQYTSKTCSNCGFTITSADYDRVLEKLKKTATGWMTTINGKELKVEGQITYYNRYKRQNVVKDLSVELDRLSEESVNNDISSWTKGRSGEALSLLKKRFSHRPVQEKFVCLNCGFETHADEQAALNIARSWLFLRSQEYKKYQTNKTTGNTDKRAFVETWQSFYRKKLKEVWKPAV

SEQ ID NO: 49200 - protein, 979 aa, synthetic construct
  REGION 1..979: note = engineered CasX variant
QEIKRINKIRRRLVKDSNTKKAGKTGPMKTLLVRVMTPDLRERLENLRKKPENIPQPISNTSRANLNKLLTDYTEMKKAILHVYWEEFQKDPVGLMSRVAQPASKKIDQNKLKPEMDEKGNLTTAGFACSQCGQPLFVYKLEQVSEKGKAYTNYFGRCNVAEHEKLILLAQLKPEKDSDEAVTYSLGKFGQRALDFYSIHVTKESTHPVKPLAQIAGNRYASGPVGKALRDACMGTIASFLSKYQDIIIEHQKVVKGNQKRLESLRELAGKENLEYPSVTLPPQPHTKEGVDAYNEVIARVRMWVNLNLWQKLKLSRDDAKPLLRLKGFPSFPLVERQANEVDWWDMVCNVKKLINEKKEDGKVFWQNLAGYKRQEALRPYLSSEEDRKKGKKFARYQLGDLLLHLEKKHGEDWGKVYDEAWERIDKKVEGLSKHIKLEEERRSEDAQSKAALTDWLRAKASFVIEGLKEADDKDEFCRCELKLQKWYGDLRGKPFAIEAENSILDISGFSKQYNCAFIWQKDGVKKLNLYLIINYFKGGKLRFKKIKPEAFEANRFYTVINKKSGEIVPMEVNFNFDDPNLIILPLAFGKRVGREFIWNDLLSLETGSLKLANGRVIEKTLYNRRTRQDEPALFVALTFERREVLDSSNIKPMNLIGVDRGENIPAVIALTDPEGCPLSRFKDSLGNPTHILRIGESYKEKQRTIQAKKEVEQRRAGGYSRKYASKAKNLADDMVRNTARDLLYYAVTQDAMLIFENLSRGFGRQGKRTFMAERQYTRMEDWLTAKLAYEGLPSKTYLSKTLAQYTSKTCSNCGFTITSADYDRVLEKLKKTATGWMTTINGKELKVEGQITYYNRYKRQNVVKDLSVELDRLSEESVNNDISSWTKGRSGEALSLLKKRFSHRPVQEKFVCLNCGFETHADEQAALNIARSWLFLRSQEYKKYQTNKTTGNTDKRAFVETWQSFYRKKLKEVWKPAV

SEQ ID NO: 49201 - protein, 979 aa, synthetic construct
  REGION 1..979: note = engineered CasX variant
QEIKRINKIRRRLVKDSNTKKAGKTGPMKTLLVRVMTPDLRERLENLRKKPENIPQPISNTSRANLNKLLTDYTEMKKAILHVYWEEFQKDPVGLMSRVAQPASKKIDQNKLKPEMDEKGNLTTAGFACSQCGQPLFVYKLEQVSEKGKAYTNYFGRCNVAEHEKLILLAQLKPEKDSDEAVTYSLGKFGQRALDFYSIHVTKESTHPVKPLAQIAGNRYASGPVGKALRDACMGTIASFLSKYQDIIIEHQKVVKGNQKRLESLRELAGKENLEYPSVTLPPQPHTKEGVDAYNEVIARVRMWVNLNLWQKLKLSRDDAKPLLRLKGFPSFPLVERQANEVDWWDMVCNVKKLINEKKEDGKVFWQNLAGYKRQEALRPYLSSEEDRKKGKKFARYQLGDLLLHLEKKHGEDWGKVYDEAWERIDKKVEGLSKHIKLEEERRSEDAQSKAALTDWLRAKASFVIEGLKEADKDEFCRCELKLQKWYGDLRGKPFAIEAENSILDISGFSKQYNCAFIWQKDGVKKLNLYLIINYFKGGKLRFKKIKPEAFEANRFYTVINKKSGEIVPMEVNFNFDDPNLIILPLAFGKRVGREFIWNDLLSLETGSLKLANGRVIEKTLYNRRTRQDEPALFVALTFERREVLDSSNIKPMNLIGVDRGENIPAVIALTDPEGCPLSRFKDSLGNPTHILRIGESYKEKQRTIQAKKEVEQRRAGGYSRKYASKAKNLADDMVRNTARDLLYYAVTQDAMLIFENLSRGFGRQGKRTFMAERQYTRMEDWLTAKLAYEGLPSKTYLSKTLAQYTSKTCSNCGFTITSADYDRVLEKLKKTATGWMTTINGKELKVEGQITYYNRYKRQNVVKDLSVELDRLSEESVNNDISSWTKGRSGNEALSLLKKRFSHRPVQEKFVCLNCGFETHADEQAALNIARSWLFLRSQEYKKYQTNKTTGNTDKRAFVETWQSFYRKKLKEVWKPAV

SEQ ID NO: 49202 - protein, 978 aa, synthetic construct
  REGION 1..978: note = engineered CasX variant
QEIKRINKIRRRLVKDSNTKKAGKTGPMKTLLVRVMTPDLRERLENLRKKPENIPQPISNTSRANLNKLLTDYTEMKKAILHVYWEEFQKDPVGLMSRVAQPASKKIDQNKLKPEMDEKGNLTTAGFACSQCGQPLFVYKLEQVSEKGKAYTNYFGRCNVAEHEKLILLAQLKPEKDSDEAVTYSLGKFGQRALDFYSIHVTKESTHPVKPLAQIAGNRYASGPVGKALRDACMGTIASFLSKYQDIIIEHQKVVKGNQKRLESLRELAGKENLEYPSVTLPPQPHTKEGVDAYNEVIARVRMWVNLNLWQKLKLSRDDAKPLLRLKGFPSFPLVERQANEVDWWDMVCNVKKLINEKKEDGKVFWQNLAGYKRQEALRPYLSSEEDRQKGKKFARYQLGDLLLHLEKKHGEDWGKVYDEAWERIDKKVEGLSKHIKLEEERRSEDAQSKAALTDWLRAKASFVIEGLKEADKDEFCRCELKLQKWYGDLRGKPFAIEAENSILDISGFSKQYNCAFIWQKDGVKKLNLYLIINYFKGGKLRFKKIKPEAFEANRFYTVINKKSGEIVPMEVNFNFDDPNLIILPLAFGKRVGREFIWNDLLSLETGSLKLANGRVIEKTLYNRRTRQDEPALFVALTFERREVLDSSNIKPMNLIGVDRGENIPAVIALTDPEGCPLSRFKDSLGNPTHILRIGESYKEKQRTIQAKKEVEQRRAGGYSRKYASKAKNLADDMVRNTARDLLYYAVTQDAMLIFENLSRGFGRQGKRTFMAERQYTRMEDWLTAKLAYEGLPSKTYLSKTLAQYTSKTCSNCGFTITSADYDRVLEKLKKTATGWMTTINGKELKVEGQITYYNRYKRQNVVKDLSVELDRLSEESVNNDISSWTKGRSGEALSLLKKRFSHRPVQEKFVCLNCGFETHADEQAALNIARSWLFLRSQEYKKYQTNKTTGNTDKRAFVETWQSFYRKKLKEVWKPAV

SEQ ID NO: 49203 - protein, 978 aa, synthetic construct
  REGION 1..978: note = engineered CasX variant
QEIKRINKIRRRLVKDSNTKKAGKTGPMKTLLVRVMTPDLRERLENLRKKPENIPQPISNTSRANLNKLLTDYTEMKKAILHVYWEEFQKDPVGLMSRVAQPASKKIDQNKLKPEMDEKGNLTTAGFACSQCGQPLFVYKLEQVSEKGKAYTNYFGRCNVAEHEKLILLAQLKPEKDSDEAVTYSLGKFGQRALDFYSIHVTKESTHPVKPLAQIAGNRYASGPVGKALRDACMGTIASFLSKYQDIIIEHQKVVKGNQKRLESLRELAGKENLEYPSVTLPPQPHTKEGVDAYNEVIARVRMWVNLNLWQKLKLSRDDAKPLLRLKGFPSFPLVERQANEVDWWDMVCNVKKLINEKKEDGKVFWQNLAGYKRQEALRPYLSSEEDRKKGKKFARYQLGDLLLHLEKKHGEDWGKVYDEAWERIDKKVEGLSKHIKLEEERRSEDAQSKAALTDWLRAKASFVIEGLKEADKDEFCRCELKLQKWYGDLRGKPFAIEAENSILDISGFSKQYNCAFIWQKDGVKKLNLYLIINYFKGGKLRFKKIKPEAFEANRFYTVINKKSGEIVPMEVNFNFDDPNLIILPLAFGKRVGREFIWNDLLSLETGSLKLANGRVIEKTLYNRRTRQDEPALFVALTFERREVLDSSNIKPMNLIGVDRGENIPAVIALTDPEGCPLSRFKDSLGNPTHILRIGESYKEKQRTIQAKKEVEQRRAGGYSRKYASKAKNLADDMVRNTARDLLYYAVTQDAMLIFENLSRGFGRQGKRTFMAERQYTRMEDWLTAKLAYEGLPSQTYLSKTLAQYTSKTCSNCGFTITSADYDRVLEKLKKTATGWMTTINGKELKVEGQITYYNRYKRQNVVKDLSVELDRLSEESVNNDISSWTKGRSGEALSLLKKRFSHRPVQEKFVCLNCGFETHADEQAALNIARSWLFLRSQEYKKYQTNKTTGNTDKRAFVETWQSFYRKKLKEVWKPAV

SEQ ID NO: 49204 - protein, 978 aa, synthetic construct
  REGION 1..978: note = engineered CasX variant
QEIKRINKIRRRLVKDSNTKKAGKTGPMKTLLVRVMTPDLRERLENLRKKPENIPQPISNTSRANLNKLLTDYTEMKKAILHVYWEEFQKDPVGLMSRVAQPASKKIDQNKLKPEMDEKGNLTTAGFACSQCGQPLFVYKLEQVSEKGKAYTNYFGRCNVAEHEKLILLAQLKPEKDSDEAVTYSLGKFGQRALDFYSIHVTKESTHPVKPLAQIAGNRYASGPVGKALRDACMGTIASFLSKYQDIIIEHQKVVKGNQKRLESLRELAGKENLEYPSVTLPPQPHTKEGVDAYNEVIARVRMWVNLNLWQKLKLSRDDAKPLLRLKGFPSFPLVERQANEVDWWDMVCNVKKLINEKKEDGKVFWQNLAGYKRQEALRPYLSSEEDRKKGKKFARYQLGDLLLHLEKKHGEDWGKVYDEAWERIDKKVEGLSKHIKLEEERRSEDAQSKAALTDWLRAKASFVIEGLKEADKDEFCRCELKLQKWYGDLRGKPFAIEAENSILDISGFSKQYNCAFIWQKDGVKKLNLYLIINYFKGGKLRFKKIKPEAFEANRFYTVINKKSGEIVPMEVNFNFDDPNLIILPLAFGKRVGREFIWNDLLSLETGSLKLANGRVIEKTLYNRRTRQDEPALFVALTFERREVLDSSNIKPMNLIGVDRGENIPAVIALTDPEGCPLSRFKDSLGNPTHILRIGESYKEKQRTIQAKKEVEQRRAGGYSRKYASKAKNLADDMVRNTARDLLYYAVTQDAMLIFENLSRGFGRQGKRTFMAERQYTRMEDWLTAKLAYNGLPSKTYLSKTLAQYTSKTCSNCGFTITSADYDRVLEKLKKTATGWMTTINGKELKVEGQITYYNRYKRQNVVKDLSVELDRLSEESVNNDISSWTKGRSGEALSLLKKRFSHRPVQEKFVCLNCGFETHADEQAALNIARSWLFLRSQEYKKYQTNKTTGNTDKRAFVETWQSFYRKKLKEVWKPAV

SEQ ID NO: 49205 - protein, 978 aa, synthetic construct
  REGION 1..978: note = engineered CasX variant
QEIKRINKIRRRLVKDSNTKKAGKTGPMKTLLVRVMTPDLRERLENLRKKPENIPQPISNTSRANLNKLLTDYTEMKKAILHVYWEEFQKDPVGLMSRVAQPASKKIDQNKLKPEMDEKGNLTTAGFACSQCGQPLFVYKLEQVSEKGKAYTNYFGRCNVAEHEKLIQLAQLKPEKDSDEAVTYSLGKFGQRALDFYSIHVTKESTHPVKPLAQIAGNRYASGPVGKALRDACMGTIASFLSKYQDIIIEHQKVVKGNQKRLESLRELAGKENLEYPSVTLPPQPHTKEGVDAYNEVIARVRMWVNLNLWQKLKLSRDDAKPLLRLKGFPSFPLVERQANEVDWWDMVCNVKKLINEKKEDGKVFWQNLAGYKRQEALRPYLSSEEDRKKGKKFARYQLGDLLLHLEKKHGEDWGKVYDEAWERIDKKVEGLSKHIKLEEERRSEDAQSKAALTDWLRAKASFVIEGLKEADKDEFCRCELKLQKWYGDLRGKPFAIEAENSILDISGFSKQYNCAFIWQKDGVKKLNLYLIINYFKGGKLRFKKIKPEAFEANRFYTVINKKSGEIVPMEVNFNFDDPNLIILPLAFGKRVGREFIWNDLLSLETGSLKLANGRVIEKTLYNRRTRQDEPALFVALTFERREVLDSSNIKPMNLIGVDRGENIPAVIALTDPEGCPLSRFKDSLGNPTHILRIGESYKEKQRTIQAKKEVEQRRAGGYSRKYASKAKNLADDMVRNTARDLLYYAVTQDAMLIFENLSRGFGRQGKRTFMAERQYTRMEDWLTAKLAYEGLPSKTYLSKTLAQYTSKTCSNCGFTITSADYDRVLEKLKKTATGWMTTINGKELKVEGQITYYNRYKRQNVVKDLSVELDRLSEESVNNDISSWTKGRSGEALSLLKKRFSHRPVQEKFVCLNCGFETHADEQAALNIARSWLFLRSQEYKKYQTNKTTGNTDKRAFVETWQSFYRKKLKEVWKPAV

SEQ ID NO: 49206 - protein, 978 aa, synthetic construct
  REGION 1..978: note = engineered CasX variant
QEIKRINKIRRRLVKDSNTKKAGKTGPMKTLLVRVMTPDLRERLENLRKKPENIPQPISNTSRANLNKLLTDYTEMKKAILHVYWEEFQKDPVGLMSRVAQPASKKIDQNKLKPEMDEKGNLTTAGFACSQCGQPLFVYKLEQVSEKGKAYTNYFGRCNVAEHEKLILLAQLKPEKDSDEAVTYSLGKFGQRALDFYSIHVTKESTHPVKPLAQIAGNRYASGPVGKALRDACMGTIASFLSKYQDIIIEHQKVVKGNQKRLESLRELAGKENLEYPSVTLPPQPHTKEGVDAYNEVIARVRMWVNLNLWQKLKLSRDDAKPLLRLKGFPSFPLVERQANEVDWWDMVCNVKKLINEKKEDGKVFWQNLAIYKRQEALRPYLSSEEDRKKGKKFARYQLGDLLLHLEKKHGEDWGKVYDEAWERIDKKVEGLSKHIKLEEERRSEDAQSKAALTDWLRAKASFVIEGLKEADKDEFCRCELKLQKWYGDLRGKPFAIEAENSILDISGFSKQYNCAFIWQKDGVKKLNLYLIINYFKGGKLRFKKIKPEAFEANRFYTVINKKSGEIVPMEVNFNFDDPNLIILPLAFGKRVGREFIWNDLLSLETGSLKLANGRVIEKTLYNRRTRQDEPALFVALTFERREVLDSSNIKPMNLIGVDRGENIPAVIALTDPEGCPLSRFKDSLGNPTHILRIGESYKEKQRTIQAKKEVEQRRAGGYSRKYASKAKNLADDMVRNTARDLLYYAVTQDAMLIFENLSRGFGRQGKRTFMAERQYTRMEDWLTAKLAYEGLPSKTYLSKTLAQYTSKTCSNCGFTITSADYDRVLEKLKKTATGWMTTINGKELKVEGQITYYNRYKRQNVVKDLSVELDRLSEESVNNDISSWTKGRSGEALSLLKKRFSHRPVQEKFVCLNCGFETHADEQAALNIARSWLFLRSQEYKKYQTNKTTGNTDKRAFVETWQSFYRKKLKEVWKPAV

SEQ ID NO: 49207 - protein, 978 aa, synthetic construct
  REGION 1..978: note = engineered CasX variant
QEIKRINKIRRRLVKDSNTKKAGKTGPMKTLLVRVMTPDLRERLENLRKKPENIPQPISNTSRANLNKLLTDYTEMKKAILHVYWEEFQKDPVGLMSRVAQPASKKIDQNKLKPEMDEKGNLTTAGFACSQCGQPLFVYKLEQVSEKGKAYTNYFGRCNVAEHEKLILLAQLKPEKDSDEAVTYSLGKFGQRALDFYSIHVTKESTHPVKPLAQIAGNRYASGPVGKALRDACMGTIASFLSKYQDIIIEHQKVVKGNQKRLESLRELAGKENLEYPSVTLPPQPHTKEGVDAYNEVIARVRMWVNLNLWQKLKLSRDDAKPLLRLKGFPSFPLVERQANEVDWWDMVCNVKKLINEKKEDGKVFWQNLAGYKRQEALRPYLSSEEDREKGKKFARYQLGDLLLHLEKKHGEDWGKVYDEAWERIDKKVEGLSKHIKLEEERRSEDAQSKAALTDWLRAKASFVIEGLKEADKDEFCRCELKLQKWYGDLRGKPFAIEAENSILDISGFSKQYNCAFIWQKDGVKKLNLYLIINYFKGGKLRFKKIKPEAFEANRFYTVINKKSGEIVPMEVNFNFDDPNLIILPLAFGKRVGREFIWNDLLSLETGSLKLANGRVIEKTLYNRRTRQDEPALFVALTFERREVLDSSNIKPMNLIGVDRGENIPAVIALTDPEGCPLSRFKDSLGNPTHILRIGESYKEKQRTIQAKKEVEQRRAGGYSRKYASKAKNLADDMVRNTARDLLYYAVTQDAMLIFENLSRGFGRQGKRTFMAERQYTRMEDWLTAKLAYEGLPSKTYLSKTLAQYTSKTCSNCGFTITSADYDRVLEKLKKTATGWMTTINGKELKVEGQITYYNRYKRQNVVKDLSVELDRLSEESVNNDISSWTKGRSGEALSLLKKRFSHRPVQEKFVCLNCGFETHADEQAALNIARSWLFLRSQEYKKYQTNKTTGNTDKRAFVETWQSFYRKKLKEVWKPAV

SEQ ID NO: 49208 - protein, 978 aa, synthetic construct
  REGION 1..978: note = engineered CasX variant
QEIKRINKIRRRLVKDSNTKKAGKTGPMKTLLVRVMTPDLRERLENLRKKPENIPQPISNTSRANLNKLLTDYTEMKKAILHVYWEEFQKDPVGLMSRVAQPASKKIDQNKLKPEMDEKGNLTTAGFACSQCGQPLFVYKLEQVSEKGKAYTNYFGRCNVAEHEKLILLAQLKPEKDSDEAVTYSLGKFGQRALDFYSIHVTKESTHPVKPLAQIAGNRYASGPVGKALRDACMGTIASFLSKYQDIIIEHQKVVKGNQKRLESLRELAGKENLEYPSVTLPPQPHTKEGVDAYNEVIARVRMWVNLNLWQKLKLSRDDAKPLLRLKGFPSFPLVERQANEVDWWDMVCNVKKLINEKKEDGKVFWQNLAGYKRQEALRPYLSSEEDRKKGKKFARYQLGDLLLHLEKKHGEDWGKVYDEAWERIDKKVEGLSKHIKLEEERRSEDAQSKAALTDWLRAKASFVIEGLKEADKDEFCRCELKLQKWYGDLRGKPFAIEAENSILDISGFSKQYNCAFIWQKDGVKKLNLYLIINYFKGGKLRFKKIKPEAFEANRFYTVINKKSGEIVIMEVNFNFDDPNLIILPLAFGKRVGREFIWNDLLSLETGSLKLANGRVIEKTLYNRRTRQDEPALFVALTFERREVLDSSNIKPMNLIGVDRGENIPAVIALTDPEGCPLSRFKDSLGNPTHILRIGESYKEKQRTIQAKKEVEQRRAGGYSRKYASKAKNLADDMVRNTARDLLYYAVTQDAMLIFENLSRGFGRQGKRTFMAERQYTRMEDWLTAKLAYEGLPSKTYLSKTLAQYTSKTCSNCGFTITSADYDRVLEKLKKTATGWMTTINGKELKVEGQITYYNRYKRQNVVKDLSVELDRLSEESVNNDISSWTKGRSGEALSLLKKRFSHRPVQEKFVCLNCGFETHADEQAALNIARSWLFLRSQEYKKYQTNKTTGNTDKRAFVETWQSFYRKKLKEVWKPAV

SEQ ID NO: 49209 - protein, 979 aa, synthetic construct
  REGION 1..979: note = engineered CasX variant
QEIKRINKIRRRLVKDSNTKKAGKTGPMKTLLVRVMTPDLRERLENLRKKPENIPQPISNTSRANLNKLLTDYTEMKKAILHVYWEEFQKDPVGLMSRVAQPASKKIDQNKLKPEMDEKGNLTTAGFACSQCGQPLFVYKLEQVSEKGKAYTNYFGRCNVAEHEKLILLAQLKPEKDSDEAVTYSLGKFGQRALDFYSIHVTKESTHPVKPLAQIAGNRYASGPVGKALRGACMGTIASFLSKYQDIIIEHQKVVKGNQKRLESLRELAGKENLEYPSVTLPPQPHTKEGVDAYNEVIARVRMWVNLNLWQKLKLSRDDAKPLLRLKGFPSFPLVERQANEVDWWDMVCNVKKLINEKKEDGKVFWQNLAGYKRQEALRPYLSSEEDRKKGKKFARYQLGDLLLHLEKKHGEDWGKVYDEAWERIDKKVEGLSKHIKLEEERRSEDAQSKAALTDWLRAKASFVIEGLKEADKDEFCRCELKLQKWYGDLRGKPFAIEAENSILDISGFSKQYNCAFIWQKDGVKKLNLYLIINYFKGGKLRFKKIKPEAFEANRFYTVINKKSGEIVPMEVNFNFDDPNLIILPLAFGKRQGREFIWNDLLSLETGSLKLANGRVIEKTLYNRRTRQDEPALFVALTFERREVLDSSNIKTPMNLIGVDRGENIPAVIALTDPEGCPLSRFKDSLGNPTHILRIGESYKEKQRTIQAKKEVEQRRAGGYSRKYASKAKNLADDMVRNTARDLLYYAVTQDAMLIFENLSRGFGRQGKRTFMAERQYTRMEDWLTAKLAYEGLPSKTYLSKTLAQYTSKTCSNCGFTITSADYDRVLEKLKKTATGWMTTINGKELKVEGQITYYNRYKRQNVVKDLSVELDRLSEESVNNDISSWTKGRSGEALSLLKKRFSHRPVQEKFVCLNCGFETHADEQAALNIARSWLFLRSQEYKKYQTNKTTGNTDKRAFVETWQSFYRKKLKEVWKPAV

SEQ ID NO: 49210 - protein, 979 aa, synthetic construct
  REGION 1..979: note = engineered CasX variant
QEIKRINKIRRRLVKDSNTKKAGKTGPMKTLLVRVMTPDLRERLENLRKKPENIPQPISNTSRANLNKLLTDYTEMKKAILHVYWEEFQKDPVGLMSRVAQPASKKIDQNKLKPEMDEKGNLTTAGFACSQCGQPLFVYKLEQVSEKGKAYTNYFGRCNVAEHEKLILLAQLKPEKDSDEAVTYSLGKFGQRALDFYSIHVTKESTHPVKPLAQIAGNRYASGPVGKALRDACMGTIASFLSKYQDIIIEHQKVVKGNQKRLESLRELAGKENLEYPSVTLPPQPHTKEGVDAYNEVIARVRMWVNLNLWQKLKLSRDDAKPLLRLKNFPSFPLVERQANEVDWWDMVCNVKKLINEKKEDGKVFWQNLAGYKRQEALRPYLSSEEDRKKGKKFARYQLGDLLLHLEKKHGEDWGKVYDEAWERIDKKVEGLSKHIKLEEERRSEDAQSKAALTDWLRAKASFVIEGLKEADKDEFCRCELKLQKWYGDLRGKPFAIEAENSILDISGFSKQYNCAFIWQKDGVKKLNLYLIINYFKGGKLRFKKIKPEAFEANRFYTVINKKSGEIVPMEVNFNFDDPNLIILPLAFGKRQGREFIWNDLLSLETGSLKLANGRVIEKTLYNRRTRQDEPALFVALTFERREVLDSSNIKTPMNLIGVDRGENIPAVIALTDPEGCPLSRFKDSLGNPTHILRIGESYKEKQRTIQAKKEVEQRRAGGYSRKYASKAKNLADDMVRNTARDLLYYAVTQDAMLIFENLSRGFGRQGKRTFMAERQYTRMEDWLTAKLAYEGLPSKTYLSKTLAQYTSKTCSNCGFTITSADYDRVLEKLKKTATGWMTTINGKELKVEGQITYYNRYKRQNVVKDLSVELDRLSEESVNNDISSWTKGRSGEALSLLKKRFSHRPVQEKFVCLNCGFETHADEQAALNIARSWLFLRSQEYKKYQTNKTTGNTDKRAFVETWQSFYRKKLKEVWKPAV

SEQ ID NO: 49211 - protein, 979 aa, synthetic construct
  REGION 1..979: note = engineered CasX variant
QEIKRINKIRRRLVKDSNTKKAGKTGPMKTLLVRVMTPDLRERLENLRKKPENIPQPISNTSRANLNKLLTDYTEMKKAILHVYWEEFQKDPVGLMSRVAQPASKKIDQNKLKPEMDEKGNLTTAGFACSQCGQPLFVYKLEQVSEKGKAYTNYFGRCNVAEHEKLILLAQLKPEKDSDEAVTYSLGKFGQRALDFYSIHVTKESTHPVKPLAQIAGNRYASGPVGKALRDACMGTIASFLSKYQDIIIEHQKVVKGNQKRLESLRELAGKENLEYPSVTLPPQPHTKEGVDAYNEVIARVRMWVNLNLWQKLKLSRDDAKPLLRLKGFPSFPLVERQANEVDWWDMVCNVKKLINEKKEDGKVFWQNLAGYKRQEALRPYLSSEEDRKKGKKFARYQLGDLLNHLEKKHGEDWGKVYDEAWERIDKKVEGLSKHIKLEEERRSEDAQSKAALTDWLRAKASFVIEGLKEADKDEFCRCELKLQKWYGDLRGKPFAIEAENSILDISGFSKQYNCAFIWQKDGVKKLNLYLIINYFKGGKLRFKKIKPEAFEANRFYTVINKKSGEIVPMEVNFNFDDPNLIILPLAFGKRQGREFIWNDLLSLETGSLKLANGRVIEKTLYNRRTRQDEPALFVALTFERREVLDSSNIKTPMNLIGVDRGENIPAVIALTDPEGCPLSRFKDSLGNPTHILRIGESYKEKQRTIQAKKEVEQRRAGGYSRKYASKAKNLADDMVRNTARDLLYYAVTQDAMLIFENLSRGFGRQGKRTFMAERQYTRMEDWLTAKLAYEGLPSKTYLSKTLAQYTSKTCSNCGFTITSADYDRVLEKLKKTATGWMTTINGKELKVEGQITYYNRYKRQNVVKDLSVELDRLSEESVNNDISSWTKGRSGEALSLLKKRFSHRPVQEKFVCLNCGFETHADEQAALNIARSWLFLRSQEYKKYQTNKTTGNTDKRAFVETWQSFYRKKLKEVWKPAV

SEQ ID NO: 49212 - protein, 979 aa, synthetic construct
  REGION 1..979: note = engineered CasX variant
QEIKRINKIRRRLVKDSNTKKAGKTGPMKTLLVRVMTPDLRERLENLRKKPENIPQPISNTSRANLNKLLTDYTEMKKAILHVYWEEFQKDPVGLMSRVAQPASKKIDQNKLKPEMDEKGNLTTAGFACSQCGQPLFVYKLEQVSEKGKAYTNYFGRCNVAEHEKLILLAQLKPEKDSDEAVTYSLGKFGQRALDFYSIHVTKESTHPVKPLAQIAGNRYASGPVGKALRDACMGTIASFLSKYQDIIIEHQKVVKGNQKRLESLRELAGKENLEYPSVTLPPQPHTKEGVDAYNEVIARVRMWVNLNLWQKLKLSRDDAKPLLRLKGFPSFPLVERQANEVDWWDMVCNVKKLINEKKEDGKVFWQNLAGYKRQEALRPYLSSEEDRKKGKKFARYQLGDLLWHLEKKHGEDWGKVYDEAWERIDKKVEGLSKHIKLEEERRSEDAQSKAALTDWLRAKASFVIEGLKEADKDEFCRCELKLQKWYGDLRGKPFAIEAENSILDISGFSKQYNCAFIWQKDGVKKLNLYLIINYFKGGKLRFKKIKPEAFEANRFYTVINKKSGEIVPMEVNFNFDDPNLIILPLAFGKRQGREFIWNDLLSLETGSLKLANGRVIEKTLYNRRTRQDEPALFVALTFERREVLDSSNIKTPMNLIGVDRGENIPAVIALTDPEGCPLSRFKDSLGNPTHILRIGESYKEKQRTIQAKKEVEQRRAGGYSRKYASKAKNLADDMVRNTARDLLYYAVTQDAMLIFENLSRGFGRQGKRTFMAERQYTRMEDWLTAKLAYEGLPSKTYLSKTLAQYTSKTCSNCGFTITSADYDRVLEKLKKTATGWMTTINGKELKVEGQITYYNRYKRQNVVKDLSVELDRLSEESVNNDISSWTKGRSGEALSLLKKRFSHRPVQEKFVCLNCGFETHADEQAALNIARSWLFLRSQEYKKYQTNKTTGNTDKRAFVETWQSFYRKKLKEVWKPAV

SEQ ID NO: 49213 - protein, 979 aa, synthetic construct
  REGION 1..979: note = engineered CasX variant
QEIKRINKIRRRLVKDSNTKKAGKTGPMKTLLVRVMTPDLRERLENLRKKPENIPQPISNTSRANLNKLLTDYTEMKKAILHVYWEEFQKDPVGLMSRVAQPASKKIDQNKLKPEMDEKGNLTTAGFACSQCGQPLFVYKLEQVSEKGKAYTNYFGRCNVAEHEKLILLAQLKPEKDSDEAVTYSLGKFGQRALDFYSIHVTKESTHPVKPLAQIAGNRYASGPVGKALRDACMGTIASFLSKYQDIIIEHQKVVKGNQKRLESLRELAGKENLEYPSVTLPPQPHTKEGVDAYNEVIARVRMWVNLNLWQKLKLSRDDAKPLLRLKGFPSFPLVERQANEVDWWDMVCNVKKLINEKKEDGKVFWQNLAGYKRQEALRPYLSSEEDRKKGKKFARYQLGDLLLHLYKKHGEDWGKVYDEAWERIDKKVEGLSKHIKLEEERRSEDAQSKAALTDWLRAKASFVIEGLKEADKDEFCRCELKLQKWYGDLRGKPFAIEAENSILDISGFSKQYNCAFIWQKDGVKKLNLYLIINYFKGGKLRFKKIKPEAFEANRFYTVINKKSGEIVPMEVNFNFDDPNLIILPLAFGKRQGREFIWNDLLSLETGSLKLANGRVIEKTLYNRRTRQDEPALFVALTFERREVLDSSNIKTPMNLIGVDRGENIPAVIALTDPEGCPLSRFKDSLGNPTHILRIGESYKEKQRTIQAKKEVEQRRAGGYSRKYASKAKNLADDMVRNTARDLLYYAVTQDAMLIFENLSRGFGRQGKRTFMAERQYTRMEDWLTAKLAYEGLPSKTYLSKTLAQYTSKTCSNCGFTITSADYDRVLEKLKKTATGWMTTINGKELKVEGQITYYNRYKRQNVVKDLSVELDRLSEESVNNDISSWTKGRSGEALSLLKKRFSHRPVQEKFVCLNCGFETHADEQAALNIARSWLFLRSQEYKKYQTNKTTGNTDKRAFVETWQSFYRKKLKEVWKPAV

SEQ ID NO: 49214 - protein, 979 aa, synthetic construct
  REGION 1..979: note = engineered CasX variant
QEIKRINKIRRRLVKDSNTKKAGKTGPMKTLLVRVMTPDLRERLENLRKKPENIPQPISNTSRANLNKLLTDYTEMKKAILHVYWEEFQKDPVGLMSRVAQPASKKIDQNKLKPEMDEKGNLTTAGFACSQCGQPLFVYKLEQVSEKGKAYTNYFGRCNVAEHEKLILLAQLKPEKDSDEAVTYSLGKFGQRALDFYSIHVTKESTHPVKPLAQIAGNRYASGPVGKALRDACMGTIASFLSKYQDIIIEHQKVVKGNQKRLESLRELAGKENLEYPSVTLPPQPHTKEGVDAYNEVIARVRMWVNLNLWQKLKLSRDDAKPLLRLKGFPSFPLVERQANEVDWWDMVCNVKKLINEKKEDGKVFWQNLAGYKRQEALRPYLSSEEDRKKGKKFARYQLGDLLLHLEKKHPEDWGKVYDEAWERIDKKVEGLSKHIKLEEERRSEDAQSKAALTDWLRAKASFVIEGLKEADKDEFCRCELKLQKWYGDLRGKPFAIEAENSILDISGFSKQYNCAFIWQKDGVKKLNLYLIINYFKGGKLRFKKIKPEAFEANRFYTVINKKSGEIVPMEVNFNFDDPNLIILPLAFGKRQGREFIWNDLLSLETGSLKLANGRVIEKTLYNRRTRQDEPALFVALTFERREVLDSSNIKTPMNLIGVDRGENIPAVIALTDPEGCPLSRFKDSLGNPTHILRIGESYKEKQRTIQAKKEVEQRRAGGYSRKYASKAKNLADDMVRNTARDLLYYAVTQDAMLIFENLSRGFGRQGKRTFMAERQYTRMEDWLTAKLAYEGLPSKTYLSKTLAQYTSKTCSNCGFTITSADYDRVLEKLKKTATGWMTTINGKELKVEGQITYYNRYKRQNVVKDLSVELDRLSEESVNNDISSWTKGRSGEALSLLKKRFSHRPVQEKFVCLNCGFETHADEQAALNIARSWLFLRSQEYKKYQTNKTTGNTDKRAFVETWQSFYRKKLKEVWKPAV

SEQ ID NO: 49215 - protein, 980 aa, synthetic construct
  REGION 1..980: note = engineered CasX variant
QEIKRINKIRRRLVKDSNTKKAGKTGPMKTLLVRVMTPDLRERLENLRKKPENIPQPISNTSRANLNKLLTDYTEMKKAILHVYWEEFQKDPVGLMSRVAQPASKKIDQNKLKPEMDEKGNLTTAGFACSQCGQPLFVYKLEQVSEKGKAYTNYFGRCNVAEHEKLILLAQLKPEKDSDEAVTYSLGKFGQRALDFYSIHVTKESTHPVKPLAQIAGNRYASGPVGKALRDACMGTIASFLSKYQDIIIEHQKVVKGNQKRLESLRELAGKENLEYPSVTLPPQPHTKEGVDAYNEVIARVRMWVNLNLWQKLKLSRDDAKPLLRLKGFPSFPLVERQANEVDWWDMVCNVKKLINEKKEDGKVFWQNLAGYKRQEALRPYLSSEEDRKKGKKFARYQLGDLLLHLEKKHGERDWGKVYDEAWERIDKKVEGLSKHIKLEEERRSEDAQSKAALTDWLRAKASFVIEGLKEADKDEFCRCELKLQKWYGDLRGKPFAIEAENSILDISGFSKQYNCAFIWQKDGVKKLNLYLIINYFKGGKLRFKKIKPEAFEANRFYTVINKKSGEIVPMEVNFNFDDPNLIILPLAFGKRQGREFIWNDLLSLETGSLKLANGRVIEKTLYNRRTRQDEPALFVALTFERREVLDSSNIKTPMNLIGVDRGENIPAVIALTDPEGCPLSRFKDSLGNPTHILRIGESYKEKQRTIQAKKEVEQRRAGGYSRKYASKAKNLADDMVRNTARDLLYYAVTQDAMLIFENLSRGFGRQGKRTFMAERQYTRMEDWLTAKLAYEGLPSKTYLSKTLAQYTSKTCSNCGFTITSADYDRVLEKLKKTATGWMTTINGKELKVEGQITYYNRYKRQNVVKDLSVELDRLSEESVNNDISSWTKGRSGEALSLLKKRFSHRPVQEKFVCLNCGFETHADEQAALNIARSWLFLRSQEYKKYQTNKTTGNTDKRAFVETWQSFYRKKLKEVWKPAV

SEQ ID NO: 49216 - protein, 980 aa, synthetic construct
  REGION 1..980: note = engineered CasX variant
QEIKRINKIRRRLVKDSNTKKAGKTGPMKTLLVRVMTPDLRERLENLRKKPENIPQPISNTSRANLNKLLTDYTEMKKAILHVYWEEFQKDPVGLMSRVAQPASKKIDQNKLKPEMDEKGNLTTAGFACSQCGQPLFVYKLEQVSEKGKAYTNYFGRCNVAEHEKLILLAQLKPEKDSDEAVTYSLGKFGQRALDFYSIHVTKESTHPVKPLAQIAGNRYASGPVGKALRDACMGTIASFLSKYQDIIIEHQKVVKGNQKRLESLRELAGKENLEYPSVTLPPQPHTKEGVDAYNEVIARVRMWVNLNLWQKLKLSRDDAKPLLRLKGFPSFPLVERQANEVDWWDMVCNVKKLINEKKEDGKVFWQNLAGYKRQEALRPYLSSEEDRKKGKKFARYQLGDLLLHLEKKHGEYDWGKVYDEAWERIDKKVEGLSKHIKLEEERRSEDAQSKAALTDWLRAKASFVIEGLKEADKDEFCRCELKLQKWYGDLRGKPFAIEAENSILDISGFSKQYNCAFIWQKDGVKKLNLYLIINYFKGGKLRFKKIKPEAFEANRFYTVINKKSGEIVPMEVNFNFDDPNLIILPLAFGKRQGREFIWNDLLSLETGSLKLANGRVIEKTLYNRRTRQDEPALFVALTFERREVLDSSNIKTPMNLIGVDRGENIPAVIALTDPEGCPLSRFKDSLGNPTHILRIGESYKEKQRTIQAKKEVEQRRAGGYSRKYASKAKNLADDMVRNTARDLLYYAVTQDAMLIFENLSRGFGRQGKRTFMAERQYTRMEDWLTAKLAYEGLPSKTYLSKTLAQYTSKTCSNCGFTITSADYDRVLEKLKKTATGWMTTINGKELKVEGQITYYNRYKRQNVVKDLSVELDRLSEESVNNDISSWTKGRSGEALSLLKKRFSHRPVQEKFVCLNCGFETHADEQAALNIARSWLFLRSQEYKKYQTNKTTGNTDKRAFVETWQSFYRKKLKEVWKPAV

SEQ ID NO: 49217 - protein, 979 aa, synthetic construct
  REGION 1..979: note = engineered CasX variant
QEIKRINKIRRRLVKDSNTKKAGKTGPMKTLLVRVMTPDLRERLENLRKKPENIPQPISNTSRANLNKLLTDYTEMKKAILHVYWEEFQKDPVGLMSRVAQPASKKIDQNKLKPEMDEKGNLTTAGFACSQCGQPLFVYKLEQVSEKGKAYTNYFGRCNVAEHEKLILLAQLKPEKDSDEAVTYSLGKFGQRALDFYSIHVTKESTHPVKPLAQIAGNRYASGPVGKALRDACMGTIASFLSKYQDIIIEHQKVVKGNQKRLESLRELAGKENLEYPSVTLPPQPHTKEGVDAYNEVIARVRMWVNLNLWQKLKLSRDDAKPLLRLKGFPSFPLVERQANEVDWWDMVCNVKKLINEKKEDGKVFWQNLAGYKRQEALRPYLSSEEDRKKGKKFARYQLGDLLLHLEKKHGEDWGDVYDEAWERIDKKVEGLSKHIKLEEERRSEDAQSKAALTDWLRAKASFVIEGLKEADKDEFCRCELKLQKWYGDLRGKPFAIEAENSILDISGFSKQYNCAFIWQKDGVKKLNLYLIINYFKGGKLRFKKIKPEAFEANRFYTVINKKSGEIVPMEVNFNFDDPNLIILPLAFGKRQGREFIWNDLLSLETGSLKLANGRVIEKTLYNRRTRQDEPALFVALTFERREVLDSSNIKTPMNLIGVDRGENIPAVIALTDPEGCPLSRFKDSLGNPTHILRIGESYKEKQRTIQAKKEVEQRRAGGYSRKYASKAKNLADDMVRNTARDLLYYAVTQDAMLIFENLSRGFGRQGKRTFMAERQYTRMEDWLTAKLAYEGLPSKTYLSKTLAQYTSKTCSNCGFTITSADYDRVLEKLKKTATGWMTTINGKELKVEGQITYYNRYKRQNVVKDLSVELDRLSEESVNNDISSWTKGRSGEALSLLKKRFSHRPVQEKFVCLNCGFETHADEQAALNIARSWLFLRSQEYKKYQTNKTTGNTDKRAFVETWQSFYRKKLKEVWKPAV

SEQ ID NO: 49218 - protein, 979 aa, synthetic construct
  REGION 1..979: note = engineered CasX variant
QEIKRINKIRRRLVKDSNTKKAGKTGPMKTLLVRVMTPDLRERLENLRKKPENIPQPISNTSRANLNKLLTDYTEMKKAILHVYWEEFQKDPVGLMSRVAQPASKKIDQNKLKPEMDEKGNLTTAGFACSQCGQPLFVYKLEQVSEKGKAYTNYFGRCNVAEHEKLILLAQLKPEKDSDEAVTYSLGKFGQRALDFYSIHVTKESTHPVKPLAQIAGNRYASGPVGKALRDACMGTIASFLSKYQDIIIEHQKVVKGNQKRLESLRELAGKENLEYPSVTLPPQPHTKEGVDAYNEVIARVRMWVNLNLWQKLKLSRDDAKPLLRLKGFPSFPLVERQANEVDWWDMVCNVKKLINEKKEDGKVFWQNLAGYKRQEALRPYLSSEEDRKKGKKFARYQLGDLLLHLEKKHGEDWGKVYGEAWERIDKKVEGLSKHIKLEEERRSEDAQSKAALTDWLRAKASFVIEGLKEADKDEFCRCELKLQKWYGDLRGKPFAIEAENSILDISGFSKQYNCAFIWQKDGVKKLNLYLIINYFKGGKLRFKKIKPEAFEANRFYTVINKKSGEIVPMEVNFNFDDPNLIILPLAFGKRQGREFIWNDLLSLETGSLKLANGRVIEKTLYNRRTRQDEPALFVALTFERREVLDSSNIKTPMNLIGVDRGENIPAVIALTDPEGCPLSRFKDSLGNPTHILRIGESYKEKQRTIQAKKEVEQRRAGGYSRKYASKAKNLADDMVRNTARDLLYYAVTQDAMLIFENLSRGFGRQGKRTFMAERQYTRMEDWLTAKLAYEGLPSKTYLSKTLAQYTSKTCSNCGFTITSADYDRVLEKLKKTATGWMTTINGKELKVEGQITYYNRYKRQNVVKDLSVELDRLSEESVNNDISSWTKGRSGEALSLLKKRFSHRPVQEKFVCLNCGFETHADEQAALNIARSWLFLRSQEYKKYQTNKTTGNTDKRAFVETWQSFYRKKLKEVWKPAV

SEQ ID NO: 49219 - protein, 979 aa, synthetic construct
  REGION 1..979: note = engineered CasX variant
QEIKRINKIRRRLVKDSNTKKAGKTGPMKTLLVRVMTPDLRERLENLRKKPENIPQPISNTSRANLNKLLTDYTEMKKAILHVYWEEFQKDPVGLMSRVAQPASKKIDQNKLKPEMDEKGNLTTAGFACSQCGQPLFVYKLEQVSEKGKAYTNYFGRCNVAEHEKLILLAQLKPEKDSDEAVTYSLGKFGQRALDFYSIHVTKESTHPVKPLAQIAGNRYASGPVGKALRDACMGTIASFLSKYQDIIIEHQKVVKGNQKRLESLRELAGKENLEYPSVTLPPQPHTKEGVDAYNEVIARVRMWVNLNLWQKLKLSRDDAKPLLRLKGFPSFPLVERQANEVDWWDMVCNVKKLINEKKEDGKVFWQNLAGYKRQEALRPYLSSEEDRKKGKKFARYQLGDLLLHLEKKHGEDWGKVYDEAWERIDKKVEGLSKHIKLEEERRSEDAQSKAALTDWLRAKASFVIEGKKEADKDEFCRCELKLQKWYGDLRGKPFAIEAENSILDISGFSKQYNCAFIWQKDGVKKLNLYLIINYFKGGKLRFKKIKPEAFEANRFYTVINKKSGEIVPMEVNFNFDDPNLIILPLAFGKRQGREFIWNDLLSLETGSLKLANGRVIEKTLYNRRTRQDEPALFVALTFERREVLDSSNIKTPMNLIGVDRGENIPAVIALTDPEGCPLSRFKDSLGNPTHILRIGESYKEKQRTIQAKKEVEQRRAGGYSRKYASKAKNLADDMVRNTARDLLYYAVTQDAMLIFENLSRGFGRQGKRTFMAERQYTRMEDWLTAKLAYEGLPSKTYLSKTLAQYTSKTCSNCGFTITSADYDRVLEKLKKTATGWMTTINGKELKVEGQITYYNRYKRQNVVKDLSVELDRLSEESVNNDISSWTKGRSGEALSLLKKRFSHRPVQEKFVCLNCGFETHADEQAALNIARSWLFLRSQEYKKYQTNKTTGNTDKRAFVETWQSFYRKKLKEVWKPAV

SEQ ID NO: 49220 - protein, 979 aa, synthetic construct
  REGION 1..979: note = engineered CasX variant
QEIKRINKIRRRLVKDSNTKKAGKTGPMKTLLVRVMTPDLRERLENLRKKPENIPQPISNTSRANLNKLLTDYTEMKKAILHVYWEEFQKDPVGLMSRVAQPASKKIDQNKLKPEMDEKGNLTTAGFACSQCGQPLFVYKLEQVSEKGKAYTNYFGRCNVAEHEKLILLAQLKPEKDSDEAVTYSLGKFGQRALDFYSIHVTKESTHPVKPLAQIAGNRYASGPVGKALRDACMGTIASFLSKYQDIIIEHQKVVKGNQKRLESLRELAGKENLEYPSVTLPPQPHTKEGVDAYNEVIARVRMWVNLNLWQKLKLSRDDAKPLLRLKGFPSFPLVERQANEVDWWDMVCNVKKLINEKKEDGKVFWQNLAGYKRQEALRPYLSSEEDRKKGKKFARYQLGDLLLHLEKKHGEDWGKVYDEAWERIDKKVEGLSKHIKLEEERRSEDAQSKAALTDWLRAKASFVIEGSKEADKDEFCRCELKLQKWYGDLRGKPFAIEAENSILDISGFSKQYNCAFIWQKDGVKKLNLYLIINYFKGGKLRFKKIKPEAFEANRFYTVINKKSGEIVPMEVNFNFDDPNLIILPLAFGKRQGREFIWNDLLSLETGSLKLANGRVIEKTLYNRRTRQDEPALFVALTFERREVLDSSNIKTPMNLIGVDRGENIPAVIALTDPEGCPLSRFKDSLGNPTHILRIGESYKEKQRTIQAKKEVEQRRAGGYSRKYASKAKNLADDMVRNTARDLLYYAVTQDAMLIFENLSRGFGRQGKRTFMAERQYTRMEDWLTAKLAYEGLPSKTYLSKTLAQYTSKTCSNCGFTITSADYDRVLEKLKKTATGWMTTINGKELKVEGQITYYNRYKRQNVVKDLSVELDRLSEESVNNDISSWTKGRSGEALSLLKKRFSHRPVQEKFVCLNCGFETHADEQAALNIARSWLFLRSQEYKKYQTNKTTGNTDKRAFVETWQSFYRKKLKEVWKPAV

SEQ ID NO: 49221 - protein, 980 aa, synthetic construct
  REGION 1..980: note = engineered CasX variant
QEIKRINKIRRRLVKDSNTKKAGKTGPMKTLLVRVMTPDLRERLENLRKKPENIPQPISNTSRANLNKLLTDYTEMKKAILHVYWEEFQKDPVGLMSRVAQPASKKIDQNKLKPEMDEKGNLTTAGFACSQCGQPLFVYKLEQVSEKGKAYTNYFGRCNVAEHEKLILLAQLKPEKDSDEAVTYSLGKFGQRALDFYSIHVTKESTHPVKPLAQIAGNRYASGPVGKALRDACMGTIASFLSKYQDIIIEHQKVVKGNQKRLESLRELAGKENLEYPSVTLPPQPHTKEGVDAYNEVIARVRMWVNLNLWQKLKLSRDDAKPLLRLKGFPSFPLVERQANEVDWWDMVCNVKKLINEKKEDGKVFWQNLAGYKRQEALRPYLSSEEDRKKGKKFARYQLGDLLLHLEKKHGEDWGKVYDEAWERIDKKVEGLSKHIKLEEERRSEDAQSKAALTDWLRAKASFVIEGLKEADDKDEFCRCELKLQKWYGDLRGKPFAIEAENSILDISGFSKQYNCAFIWQKDGVKKLNLYLIINYFKGGKLRFKKIKPEAFEANRFYTVINKKSGEIVPMEVNFNFDDPNLIILPLAFGKRQGREFIWNDLLSLETGSLKLANGRVIEKTLYNRRTRQDEPALFVALTFERREVLDSSNIKTPMNLIGVDRGENIPAVIALTDPEGCPLSRFKDSLGNPTHILRIGESYKEKQRTIQAKKEVEQRRAGGYSRKYASKAKNLADDMVRNTARDLLYYAVTQDAMLIFENLSRGFGRQGKRTFMAERQYTRMEDWLTAKLAYEGLPSKTYLSKTLAQYTSKTCSNCGFTITSADYDRVLEKLKKTATGWMTTINGKELKVEGQITYYNRYKRQNVVKDLSVELDRLSEESVNNDISSWTKGRSGEALSLLKKRFSHRPVQEKFVCLNCGFETHADEQAALNIARSWLFLRSQEYKKYQTNKTTGNTDKRAFVETWQSFYRKKLKEVWKPAV

SEQ ID NO: 49222 - protein, 980 aa, synthetic construct
  REGION 1..980: note = engineered CasX variant
QEIKRINKIRRRLVKDSNTKKAGKTGPMKTLLVRVMTPDLRERLENLRKKPENIPQPISNTSRANLNKLLTDYTEMKKAILHVYWEEFQKDPVGLMSRVAQPASKKIDQNKLKPEMDEKGNLTTAGFACSQCGQPLFVYKLEQVSEKGKAYTNYFGRCNVAEHEKLILLAQLKPEKDSDEAVTYSLGKFGQRALDFYSIHVTKESTHPVKPLAQIAGNRYASGPVGKALRDACMGTIASFLSKYQDIIIEHQKVVKGNQKRLESLRELAGKENLEYPSVTLPPQPHTKEGVDAYNEVIARVRMWVNLNLWQKLKLSRDDAKPLLRLKGFPSFPLVERQANEVDWWDMVCNVKKLINEKKEDGKVFWQNLAGYKRQEALRPYLSSEEDRKKGKKFARYQLGDLLLHLEKKHGEDWGKVYDEAWERIDKKVEGLSKHIKLEEERRSEDAQSKAALTDWLRAKASFVIEGLKEADKDEFCRCELKLQKWYGDLRGKPFAIEAENSILDISGFSKQYNCAFIWQKDGVKKLNLYLIINYFKGGKLRFKKIKPEAFEANRFYTVINKKSGEIVPMEVNFNFDDPNLIILPLAFGKRQGREFIWNDLLSLETGSLKLANGRVIEKTLYNRRTRQDEPALFVALTFERREVLDSSNIKTPMNLIGVDRGENIPAVIALTDPEGCPLSRFKDSLGNPTHILRIGESYKEKQRTIQAKKEVEQRRAGGYSRKYASKAKNLADDMVRNTARDLLYYAVTQDAMLIFENLSRGFGRQGKRTFMAERQYTRMEDWLTAKLAYEGLPSKTYLSKTLAQYTSKTCSNCGFTITSADYDRVLEKLKKTATGWMTTINGKELKVEGQITYYNRYKRQNVVKDLSVELDRLSEESVNNDISSWTKGRSGNEALSLLKKRFSHRPVQEKFVCLNCGFETHADEQAALNIARSWLFLRSQEYKKYQTNKTTGNTDKRAFVETWQSFYRKKLKEVWKPAV

SEQ ID NO: 49223 - protein, 979 aa, synthetic construct
  REGION 1..979: note = engineered CasX variant
QEIKRINKIRRRLVKDSNTKKAGKTGPMKTLLVRVMTPDLRERLENLRKKPENIPQPISNTSRANLNKLLTDYTEMKKAILHVYWEEFQKDPVGLMSRVAQPASKKIDQNKLKPEMDEKGNLTTAGFACSQCGQPLFVYKLEQVSEKGKAYTNYFGRCNVAEHEKLILLAQLKPEKDSDEAVTYSLGKFGQRALDFYSIHVTKESTHPVKPLAQIAGNRYASGPVGKALRDACMGTIASFLSKYQDIIIEHQKVVKGNQKRLESLRELAGKENLEYPSVTLPPQPHTKEGVDAYNEVIARVRMWVNLNLWQKLKLSRDDAKPLLRLKGFPSFPLVERQANEVDWWDMVCNVKKLINEKKEDGKVFWQNLAGYKRQEALRPYLSSEEDRQKGKKFARYQLGDLLLHLEKKHGEDWGKVYDEAWERIDKKVEGLSKHIKLEEERRSEDAQSKAALTDWLRAKASFVIEGLKEADKDEFCRCELKLQKWYGDLRGKPFAIEAENSILDISGFSKQYNCAFIWQKDGVKKLNLYLIINYFKGGKLRFKKIKPEAFEANRFYTVINKKSGEIVPMEVNFNFDDPNLIILPLAFGKRQGREFIWNDLLSLETGSLKLANGRVIEKTLYNRRTRQDEPALFVALTFERREVLDSSNIKTPMNLIGVDRGENIPAVIALTDPEGCPLSRFKDSLGNPTHILRIGESYKEKQRTIQAKKEVEQRRAGGYSRKYASKAKNLADDMVRNTARDLLYYAVTQDAMLIFENLSRGFGRQGKRTFMAERQYTRMEDWLTAKLAYEGLPSKTYLSKTLAQYTSKTCSNCGFTITSADYDRVLEKLKKTATGWMTTINGKELKVEGQITYYNRYKRQNVVKDLSVELDRLSEESVNNDISSWTKGRSGEALSLLKKRFSHRPVQEKFVCLNCGFETHADEQAALNIARSWLFLRSQEYKKYQTNKTTGNTDKRAFVETWQSFYRKKLKEVWKPAV

SEQ ID NO: 49224 - protein, 979 aa, synthetic construct
  REGION 1..979: note = engineered CasX variant
QEIKRINKIRRRLVKDSNTKKAGKTGPMKTLLVRVMTPDLRERLENLRKKPENIPQPISNTSRANLNKLLTDYTEMKKAILHVYWEEFQKDPVGLMSRVAQPASKKIDQNKLKPEMDEKGNLTTAGFACSQCGQPLFVYKLEQVSEKGKAYTNYFGRCNVAEHEKLILLAQLKPEKDSDEAVTYSLGKFGQRALDFYSIHVTKESTHPVKPLAQIAGNRYASGPVGKALRDACMGTIASFLSKYQDIIIEHQKVVKGNQKRLESLRELAGKENLEYPSVTLPPQPHTKEGVDAYNEVIARVRMWVNLNLWQKLKLSRDDAKPLLRLKGFPSFPLVERQANEVDWWDMVCNVKKLINEKKEDGKVFWQNLAGYKRQEALRPYLSSEEDRKKGKKFARYQLGDLLLHLEKKHGEDWGKVYDEAWERIDKKVEGLSKHIKLEEERRSEDAQSKAALTDWLRAKASFVIEGLKEADKDEFCRCELKLQKWYGDLRGKPFAIEAENSILDISGFSKQYNCAFIWQKDGVKKLNLYLIINYFKGGKLRFKKIKPEAFEANRFYTVINKKSGEIVPMEVNFNFDDPNLIILPLAFGKRQGREFIWNDLLSLETGSLKLANGRVIEKTLYNRRTRQDEPALFVALTFERREVLDSSNIKTPMNLIGVDRGENIPAVIALTDPEGCPLSRFKDSLGNPTHILRIGESYKEKQRTIQAKKEVEQRRAGGYSRKYASKAKNLADDMVRNTARDLLYYAVTQDAMLIFENLSRGFGRQGKRTFMAERQYTRMEDWLTAKLAYEGLPSQTYLSKTLAQYTSKTCSNCGFTITSADYDRVLEKLKKTATGWMTTINGKELKVEGQITYYNRYKRQNVVKDLSVELDRLSEESVNNDISSWTKGRSGEALSLLKKRFSHRPVQEKFVCLNCGFETHADEQAALNIARSWLFLRSQEYKKYQTNKTTGNTDKRAFVETWQSFYRKKLKEVWKPAV

SEQ ID NO: 49225 - protein, 979 aa, synthetic construct
  REGION 1..979: note = engineered CasX variant
QEIKRINKIRRRLVKDSNTKKAGKTGPMKTLLVRVMTPDLRERLENLRKKPENIPQPISNTSRANLNKLLTDYTEMKKAILHVYWEEFQKDPVGLMSRVAQPASKKIDQNKLKPEMDEKGNLTTAGFACSQCGQPLFVYKLEQVSEKGKAYTNYFGRCNVAEHEKLILLAQLKPEKDSDEAVTYSLGKFGQRALDFYSIHVTKESTHPVKPLAQIAGNRYASGPVGKALRDACMGTIASFLSKYQDIIIEHQKVVKGNQKRLESLRELAGKENLEYPSVTLPPQPHTKEGVDAYNEVIARVRMWVNLNLWQKLKLSRDDAKPLLRLKGFPSFPLVERQANEVDWWDMVCNVKKLINEKKEDGKVFWQNLAGYKRQEALRPYLSSEEDRKKGKKFARYQLGDLLLHLEKKHGEDWGKVYDEAWERIDKKVEGLSKHIKLEEERRSEDAQSKAALTDWLRAKASFVIEGLKEADKDEFCRCELKLQKWYGDLRGKPFAIEAENSILDISGFSKQYNCAFIWQKDGVKKLNLYLIINYFKGGKLRFKKIKPEAFEANRFYTVINKKSGEIVPMEVNFNFDDPNLIILPLAFGKRQGREFIWNDLLSLETGSLKLANGRVIEKTLYNRRTRQDEPALFVALTFERREVLDSSNIKTPMNLIGVDRGENIPAVIALTDPEGCPLSRFKDSLGNPTHILRIGESYKEKQRTIQAKKEVEQRRAGGYSRKYASKAKNLADDMVRNTARDLLYYAVTQDAMLIFENLSRGFGRQGKRTFMAERQYTRMEDWLTAKLAYNGLPSKTYLSKTLAQYTSKTCSNCGFTITSADYDRVLEKLKKTATGWMTTINGKELKVEGQITYYNRYKRQNVVKDLSVELDRLSEESVNNDISSWTKGRSGEALSLLKKRFSHRPVQEKFVCLNCGFETHADEQAALNIARSWLFLRSQEYKKYQTNKTTGNTDKRAFVETWQSFYRKKLKEVWKPAV

SEQ ID NO: 49226 - protein, 979 aa, synthetic construct
  REGION 1..979: note = engineered CasX variant
QEIKRINKIRRRLVKDSNTKKAGKTGPMKTLLVRVMTPDLRERLENLRKKPENIPQPISNTSRANLNKLLTDYTEMKKAILHVYWEEFQKDPVGLMSRVAQPASKKIDQNKLKPEMDEKGNLTTAGFACSQCGQPLFVYKLEQVSEKGKAYTNYFGRCNVAEHEKLIQLAQLKPEKDSDEAVTYSLGKFGQRALDFYSIHVTKESTHPVKPLAQIAGNRYASGPVGKALRDACMGTIASFLSKYQDIIIEHQKVVKGNQKRLESLRELAGKENLEYPSVTLPPQPHTKEGVDAYNEVIARVRMWVNLNLWQKLKLSRDDAKPLLRLKGFPSFPLVERQANEVDWWDMVCNVKKLINEKKEDGKVFWQNLAGYKRQEALRPYLSSEEDRKKGKKFARYQLGDLLLHLEKKHGEDWGKVYDEAWERIDKKVEGLSKHIKLEEERRSEDAQSKAALTDWLRAKASFVIEGLKEADKDEFCRCELKLQKWYGDLRGKPFAIEAENSILDISGFSKQYNCAFIWQKDGVKKLNLYLIINYFKGGKLRFKKIKPEAFEANRFYTVINKKSGEIVPMEVNFNFDDPNLIILPLAFGKRQGREFIWNDLLSLETGSLKLANGRVIEKTLYNRRTRQDEPALFVALTFERREVLDSSNIKTPMNLIGVDRGENIPAVIALTDPEGCPLSRFKDSLGNPTHILRIGESYKEKQRTIQAKKEVEQRRAGGYSRKYASKAKNLADDMVRNTARDLLYYAVTQDAMLIFENLSRGFGRQGKRTFMAERQYTRMEDWLTAKLAYEGLPSKTYLSKTLAQYTSKTCSNCGFTITSADYDRVLEKLKKTATGWMTTINGKELKVEGQITYYNRYKRQNVVKDLSVELDRLSEESVNNDISSWTKGRSGEALSLLKKRFSHRPVQEKFVCLNCGFETHADEQAALNIARSWLFLRSQEYKKYQTNKTTGNTDKRAFVETWQSFYRKKLKEVWKPAV

SEQ ID NO: 49227 - protein, 979 aa, synthetic construct
  REGION 1..979: note = engineered CasX variant
QEIKRINKIRRRLVKDSNTKKAGKTGPMKTLLVRVMTPDLRERLENLRKKPENIPQPISNTSRANLNKLLTDYTEMKKAILHVYWEEFQKDPVGLMSRVAQPASKKIDQNKLKPEMDEKGNLTTAGFACSQCGQPLFVYKLEQVSEKGKAYTNYFGRCNVAEHEKLILLAQLKPEKDSDEAVTYSLGKFGQRALDFYSIHVTKESTHPVKPLAQIAGNRYASGPVGKALRDACMGTIASFLSKYQDIIIEHQKVVKGNQKRLESLRELAGKENLEYPSVTLPPQPHTKEGVDAYNEVIARVRMWVNLNLWQKLKLSRDDAKPLLRLKGFPSFPLVERQANEVDWWDMVCNVKKLINEKKEDGKVFWQNLAIYKRQEALRPYLSSEEDRKKGKKFARYQLGDLLLHLEKKHGEDWGKVYDEAWERIDKKVEGLSKHIKLEEERRSEDAQSKAALTDWLRAKASFVIEGLKEADKDEFCRCELKLQKWYGDLRGKPFAIEAENSILDISGFSKQYNCAFIWQKDGVKKLNLYLIINYFKGGKLRFKKIKPEAFEANRFYTVINKKSGEIVPMEVNFNFDDPNLIILPLAFGKRQGREFIWNDLLSLETGSLKLANGRVIEKTLYNRRTRQDEPALFVALTFERREVLDSSNIKTPMNLIGVDRGENIPAVIALTDPEGCPLSRFKDSLGNPTHILRIGESYKEKQRTIQAKKEVEQRRAGGYSRKYASKAKNLADDMVRNTARDLLYYAVTQDAMLIFENLSRGFGRQGKRTFMAERQYTRMEDWLTAKLAYEGLPSKTYLSKTLAQYTSKTCSNCGFTITSADYDRVLEKLKKTATGWMTTINGKELKVEGQITYYNRYKRQNVVKDLSVELDRLSEESVNNDISSWTKGRSGEALSLLKKRFSHRPVQEKFVCLNCGFETHADEQAALNIARSWLFLRSQEYKKYQTNKTTGNTDKRAFVETWQSFYRKKLKEVWKPAV

SEQ ID NO: 49228 - protein, 979 aa, synthetic construct
  REGION 1..979: note = engineered CasX variant
QEIKRINKIRRRLVKDSNTKKAGKTGPMKTLLVRVMTPDLRERLENLRKKPENIPQPISNTSRANLNKLLTDYTEMKKAILHVYWEEFQKDPVGLMSRVAQPASKKIDQNKLKPEMDEKGNLTTAGFACSQCGQPLFVYKLEQVSEKGKAYTNYFGRCNVAEHEKLILLAQLKPEKDSDEAVTYSLGKFGQRALDFYSIHVTKESTHPVKPLAQIAGNRYASGPVGKALRDACMGTIASFLSKYQDIIIEHQKVVKGNQKRLESLRELAGKENLEYPSVTLPPQPHTKEGVDAYNEVIARVRMWVNLNLWQKLKLSRDDAKPLLRLKGFPSFPLVERQANEVDWWDMVCNVKKLINEKKEDGKVFWQNLAGYKRQEALRPYLSSEEDREKGKKFARYQLGDLLLHLEKKHGEDWGKVYDEAWERIDKKVEGLSKHIKLEEERRSEDAQSKAALTDWLRAKASFVIEGLKEADKDEFCRCELKLQKWYGDLRGKPFAIEAENSILDISGFSKQYNCAFIWQKDGVKKLNLYLIINYFKGGKLRFKKIKPEAFEANRFYTVINKKSGEIVPMEVNFNFDDPNLIILPLAFGKRQGREFIWNDLLSLETGSLKLANGRVIEKTLYNRRTRQDEPALFVALTFERREVLDSSNIKTPMNLIGVDRGENIPAVIALTDPEGCPLSRFKDSLGNPTHILRIGESYKEKQRTIQAKKEVEQRRAGGYSRKYASKAKNLADDMVRNTARDLLYYAVTQDAMLIFENLSRGFGRQGKRTFMAERQYTRMEDWLTAKLAYEGLPSKTYLSKTLAQYTSKTCSNCGFTITSADYDRVLEKLKKTATGWMTTINGKELKVEGQITYYNRYKRQNVVKDLSVELDRLSEESVNNDISSWTKGRSGEALSLLKKRFSHRPVQEKFVCLNCGFETHADEQAALNIARSWLFLRSQEYKKYQTNKTTGNTDKRAFVETWQSFYRKKLKEVWKPAV

SEQ ID NO: 49229 - protein, 979 aa, synthetic construct
  REGION 1..979: note = engineered CasX variant
QEIKRINKIRRRLVKDSNTKKAGKTGPMKTLLVRVMTPDLRERLENLRKKPENIPQPISNTSRANLNKLLTDYTEMKKAILHVYWEEFQKDPVGLMSRVAQPASKKIDQNKLKPEMDEKGNLTTAGFACSQCGQPLFVYKLEQVSEKGKAYTNYFGRCNVAEHEKLILLAQLKPEKDSDEAVTYSLGKFGQRALDFYSIHVTKESTHPVKPLAQIAGNRYASGPVGKALRDACMGTIASFLSKYQDIIIEHQKVVKGNQKRLESLRELAGKENLEYPSVTLPPQPHTKEGVDAYNEVIARVRMWVNLNLWQKLKLSRDDAKPLLRLKGFPSFPLVERQANEVDWWDMVCNVKKLINEKKEDGKVFWQNLAGYKRQEALRPYLSSEEDRKKGKKFARYQLGDLLLHLEKKHGEDWGKVYDEAWERIDKKVEGLSKHIKLEEERRSEDAQSKAALTDWLRAKASFVIEGLKEADKDEFCRCELKLQKWYGDLRGKPFAIEAENSILDISGFSKQYNCAFIWQKDGVKKLNLYLIINYFKGGKLRFKKIKPEAFEANRFYTVINKKSGEIVIMEVNFNFDDPNLIILPLAFGKRQGREFIWNDLLSLETGSLKLANGRVIEKTLYNRRTRQDEPALFVALTFERREVLDSSNIKTPMNLIGVDRGENIPAVIALTDPEGCPLSRFKDSLGNPTHILRIGESYKEKQRTIQAKKEVEQRRAGGYSRKYASKAKNLADDMVRNTARDLLYYAVTQDAMLIFENLSRGFGRQGKRTFMAERQYTRMEDWLTAKLAYEGLPSKTYLSKTLAQYTSKTCSNCGFTITSADYDRVLEKLKKTATGWMTTINGKELKVEGQITYYNRYKRQNVVKDLSVELDRLSEESVNNDISSWTKGRSGEALSLLKKRFSHRPVQEKFVCLNCGFETHADEQAALNIARSWLFLRSQEYKKYQTNKTTGNTDKRAFVETWQSFYRKKLKEVWKPAV

SEQ ID NO: 49230 - protein, 979 aa, synthetic construct
  REGION 1..979: note = engineered CasX variant
QEIKRINKIRRRLVKDSNTKKAGKTGPMKTLLVRVMTPDLRERLENLRKKPENIPQPISNTSRANLNKLLTDYTEMKKAILHVYWEEFQKDPVGLMSRVAQPASKKIDQNKLKPEMDEKGNLTTAGFACSQCGQPLFVYKLEQVSEKGKAYTNYFGRCNVAEHEKLILLAQLKPEKDSDEAVTYSLGKFGQRALDFYSIHVTKESTHPVKPLAQIAGNRYASGPVGKALRGACMGTIASFLSKYQDIIIEHQKVVKGNQKRLESLRELAGKENLEYPSVTLPPQPHTKEGVDAYNEVIARVRMWVNLNLWQKLKLSRDDAKPLLRLKGFPSFPLVERQANEVDWWDMVCNVKKLINEKKEDGKVFWQNLAGYKRQEALRPYLSSEEDRKKGKKFARYQLGDLLLHLEKKHGEDWGKVYDEAWERIDKKVEGLSKHIKLEEERRSEDAQSKAALTDWLRAKASFVIEGLKEADKDEFCRCELKLQKWYGDLRGKPFAIEAENSILDISGFSKQYNCAFIWQKDGVKKLNLYLIINYFKGGKLRFKKIKPEAFEANRFYTVINKKSGEIVPMEVNFNFDDPNLIILPLAFGKRQGREFIWNDLLSLETGSLKLANGRVIEKTLYNRRTRQDEPALFVALTFERREVLDSSNIKPMSNLIGVDRGENIPAVIALTDPEGCPLSRFKDSLGNPTHILRIGESYKEKQRTIQAKKEVEQRRAGGYSRKYASKAKNLADDMVRNTARDLLYYAVTQDAMLIFENLSRGFGRQGKRTFMAERQYTRMEDWLTAKLAYEGLPSKTYLSKTLAQYTSKTCSNCGFTITSADYDRVLEKLKKTATGWMTTINGKELKVEGQITYYNRYKRQNVVKDLSVELDRLSEESVNNDISSWTKGRSGEALSLLKKRFSHRPVQEKFVCLNCGFETHADEQAALNIARSWLFLRSQEYKKYQTNKTTGNTDKRAFVETWQSFYRKKLKEVWKPAV

SEQ ID NO: 49231 - protein, 979 aa, synthetic construct
  REGION 1..979: note = engineered CasX variant
QEIKRINKIRRRLVKDSNTKKAGKTGPMKTLLVRVMTPDLRERLENLRKKPENIPQPISNTSRANLNKLLTDYTEMKKAILHVYWEEFQKDPVGLMSRVAQPASKKIDQNKLKPEMDEKGNLTTAGFACSQCGQPLFVYKLEQVSEKGKAYTNYFGRCNVAEHEKLILLAQLKPEKDSDEAVTYSLGKFGQRALDFYSIHVTKESTHPVKPLAQIAGNRYASGPVGKALRDACMGTIASFLSKYQDIIIEHQKVVKGNQKRLESLRELAGKENLEYPSVTLPPQPHTKEGVDAYNEVIARVRMWVNLNLWQKLKLSRDDAKPLLRLKNFPSFPLVERQANEVDWWDMVCNVKKLINEKKEDGKVFWQNLAGYKRQEALRPYLSSEEDRKKGKKFARYQLGDLLLHLEKKHGEDWGKVYDEAWERIDKKVEGLSKHIKLEEERRSEDAQSKAALTDWLRAKASFVIEGLKEADKDEFCRCELKLQKWYGDLRGKPFAIEAENSILDISGFSKQYNCAFIWQKDGVKKLNLYLIINYFKGGKLRFKKIKPEAFEANRFYTVINKKSGEIVPMEVNFNFDDPNLIILPLAFGKRQGREFIWNDLLSLETGSLKLANGRVIEKTLYNRRTRQDEPALFVALTFERREVLDSSNIKPMSNLIGVDRGENIPAVIALTDPEGCPLSRFKDSLGNPTHILRIGESYKEKQRTIQAKKEVEQRRAGGYSRKYASKAKNLADDMVRNTARDLLYYAVTQDAMLIFENLSRGFGRQGKRTFMAERQYTRMEDWLTAKLAYEGLPSKTYLSKTLAQYTSKTCSNCGFTITSADYDRVLEKLKKTATGWMTTINGKELKVEGQITYYNRYKRQNVVKDLSVELDRLSEESVNNDISSWTKGRSGEALSLLKKRFSHRPVQEKFVCLNCGFETHADEQAALNIARSWLFLRSQEYKKYQTNKTTGNTDKRAFVETWQSFYRKKLKEVWKPAV

SEQ ID NO: 49232 - protein, 979 aa, synthetic construct
  REGION 1..979: note = engineered CasX variant
QEIKRINKIRRRLVKDSNTKKAGKTGPMKTLLVRVMTPDLRERLENLRKKPENIPQPISNTSRANLNKLLTDYTEMKKAILHVYWEEFQKDPVGLMSRVAQPASKKIDQNKLKPEMDEKGNLTTAGFACSQCGQPLFVYKLEQVSEKGKAYTNYFGRCNVAEHEKLILLAQLKPEKDSDEAVTYSLGKFGQRALDFYSIHVTKESTHPVKPLAQIAGNRYASGPVGKALRDACMGTIASFLSKYQDIIIEHQKVVKGNQKRLESLRELAGKENLEYPSVTLPPQPHTKEGVDAYNEVIARVRMWVNLNLWQKLKLSRDDAKPLLRLKGFPSFPLVERQANEVDWWDMVCNVKKLINEKKEDGKVFWQNLAGYKRQEALRPYLSSEEDRKKGKKFARYQLGDLLNHLEKKHGEDWGKVYDEAWERIDKKVEGLSKHIKLEEERRSEDAQSKAALTDWLRAKASFVIEGLKEADKDEFCRCELKLQKWYGDLRGKPFAIEAENSILDISGFSKQYNCAFIWQKDGVKKLNLYLIINYFKGGKLRFKKIKPEAFEANRFYTVINKKSGEIVPMEVNFNFDDPNLIILPLAFGKRQGREFIWNDLLSLETGSLKLANGRVIEKTLYNRRTRQDEPALFVALTFERREVLDSSNIKPMSNLIGVDRGENIPAVIALTDPEGCPLSRFKDSLGNPTHILRIGESYKEKQRTIQAKKEVEQRRAGGYSRKYASKAKNLADDMVRNTARDLLYYAVTQDAMLIFENLSRGFGRQGKRTFMAERQYTRMEDWLTAKLAYEGLPSKTYLSKTLAQYTSKTCSNCGFTITSADYDRVLEKLKKTATGWMTTINGKELKVEGQITYYNRYKRQNVVKDLSVELDRLSEESVNNDISSWTKGRSGEALSLLKKRFSHRPVQEKFVCLNCGFETHADEQAALNIARSWLFLRSQEYKKYQTNKTTGNTDKRAFVETWQSFYRKKLKEVWKPAV

SEQ ID NO: 49233 - protein, 979 aa, synthetic construct
  REGION 1..979: note = engineered CasX variant
QEIKRINKIRRRLVKDSNTKKAGKTGPMKTLLVRVMTPDLRERLENLRKKPENIPQPISNTSRANLNKLLTDYTEMKKAILHVYWEEFQKDPVGLMSRVAQPASKKIDQNKLKPEMDEKGNLTTAGFACSQCGQPLFVYKLEQVSEKGKAYTNYFGRCNVAEHEKLILLAQLKPEKDSDEAVTYSLGKFGQRALDFYSIHVTKESTHPVKPLAQIAGNRYASGPVGKALRDACMGTIASFLSKYQDIIIEHQKVVKGNQKRLESLRELAGKENLEYPSVTLPPQPHTKEGVDAYNEVIARVRMWVNLNLWQKLKLSRDDAKPLLRLKGFPSFPLVERQANEVDWWDMVCNVKKLINEKKEDGKVFWQNLAGYKRQEALRPYLSSEEDRKKGKKFARYQLGDLLWHLEKKHGEDWGKVYDEAWERIDKKVEGLSKHIKLEEERRSEDAQSKAALTDWLRAKASFVIEGLKEADKDEFCRCELKLQKWYGDLRGKPFAIEAENSILDISGFSKQYNCAFIWQKDGVKKLNLYLIINYFKGGKLRFKKIKPEAFEANRFYTVINKKSGEIVPMEVNFNFDDPNLIILPLAFGKRQGREFIWNDLLSLETGSLKLANGRVIEKTLYNRRTRQDEPALFVALTFERREVLDSSNIKPMSNLIGVDRGENIPAVIALTDPEGCPLSRFKDSLGNPTHILRIGESYKEKQRTIQAKKEVEQRRAGGYSRKYASKAKNLADDMVRNTARDLLYYAVTQDAMLIFENLSRGFGRQGKRTFMAERQYTRMEDWLTAKLAYEGLPSKTYLSKTLAQYTSKTCSNCGFTITSADYDRVLEKLKKTATGWMTTINGKELKVEGQITYYNRYKRQNVVKDLSVELDRLSEESVNNDISSWTKGRSGEALSLLKKRFSHRPVQEKFVCLNCGFETHADEQAALNIARSWLFLRSQEYKKYQTNKTTGNTDKRAFVETWQSFYRKKLKEVWKPAV

SEQ ID NO: 49234 - protein, 979 aa, synthetic construct
  REGION 1..979: note = engineered CasX variant
QEIKRINKIRRRLVKDSNTKKAGKTGPMKTLLVRVMTPDLRERLENLRKKPENIPQPISNTSRANLNKLLTDYTEMKKAILHVYWEEFQKDPVGLMSRVAQPASKKIDQNKLKPEMDEKGNLTTAGFACSQCGQPLFVYKLEQVSEKGKAYTNYFGRCNVAEHEKLILLAQLKPEKDSDEAVTYSLGKFGQRALDFYSIHVTKESTHPVKPLAQIAGNRYASGPVGKALRDACMGTIASFLSKYQDIIIEHQKVVKGNQKRLESLRELAGKENLEYPSVTLPPQPHTKEGVDAYNEVIARVRMWVNLNLWQKLKLSRDDAKPLLRLKGFPSFPLVERQANEVDWWDMVCNVKKLINEKKEDGKVFWQNLAGYKRQEALRPYLSSEEDRKKGKKFARYQLGDLLLHLYKKHGEDWGKVYDEAWERIDKKVEGLSKHIKLEEERRSEDAQSKAALTDWLRAKASFVIEGLKEADKDEFCRCELKLQKWYGDLRGKPFAIEAENSILDISGFSKQYNCAFIWQKDGVKKLNLYLIINYFKGGKLRFKKIKPEAFEANRFYTVINKKSGEIVPMEVNFNFDDPNLIILPLAFGKRQGREFIWNDLLSLETGSLKLANGRVIEKTLYNRRTRQDEPALFVALTFERREVLDSSNIKPMSNLIGVDRGENIPAVIALTDPEGCPLSRFKDSLGNPTHILRIGESYKEKQRTIQAKKEVEQRRAGGYSRKYASKAKNLADDMVRNTARDLLYYAVTQDAMLIFENLSRGFGRQGKRTFMAERQYTRMEDWLTAKLAYEGLPSKTYLSKTLAQYTSKTCSNCGFTITSADYDRVLEKLKKTATGWMTTINGKELKVEGQITYYNRYKRQNVVKDLSVELDRLSEESVNNDISSWTKGRSGEALSLLKKRFSHRPVQEKFVCLNCGFETHADEQAALNIARSWLFLRSQEYKKYQTNKTTGNTDKRAFVETWQSFYRKKLKEVWKPAV

SEQ ID NO: 49235 - protein, 979 aa, synthetic construct
  REGION 1..979: note = engineered CasX variant
QEIKRINKIRRRLVKDSNTKKAGKTGPMKTLLVRVMTPDLRERLENLRKKPENIPQPISNTSRANLNKLLTDYTEMKKAILHVYWEEFQKDPVGLMSRVAQPASKKIDQNKLKPEMDEKGNLTTAGFACSQCGQPLFVYKLEQVSEKGKAYTNYFGRCNVAEHEKLILLAQLKPEKDSDEAVTYSLGKFGQRALDFYSIHVTKESTHPVKPLAQIAGNRYASGPVGKALRDACMGTIASFLSKYQDIIIEHQKVVKGNQKRLESLRELAGKENLEYPSVTLPPQPHTKEGVDAYNEVIARVRMWVNLNLWQKLKLSRDDAKPLLRLKGFPSFPLVERQANEVDWWDMVCNVKKLINEKKEDGKVFWQNLAGYKRQEALRPYLSSEEDRKKGKKFARYQLGDLLLHLEKKHPEDWGKVYDEAWERIDKKVEGLSKHIKLEEERRSEDAQSKAALTDWLRAKASFVIEGLKEADKDEFCRCELKLQKWYGDLRGKPFAIEAENSILDISGFSKQYNCAFIWQKDGVKKLNLYLIINYFKGGKLRFKKIKPEAFEANRFYTVINKKSGEIVPMEVNFNFDDPNLIILPLAFGKRQGREFIWNDLLSLETGSLKLANGRVIEKTLYNRRTRQDEPALFVALTFERREVLDSSNIKPMSNLIGVDRGENIPAVIALTDPEGCPLSRFKDSLGNPTHILRIGESYKEKQRTIQAKKEVEQRRAGGYSRKYASKAKNLADDMVRNTARDLLYYAVTQDAMLIFENLSRGFGRQGKRTFMAERQYTRMEDWLTAKLAYEGLPSKTYLSKTLAQYTSKTCSNCGFTITSADYDRVLEKLKKTATGWMTTINGKELKVEGQITYYNRYKRQNVVKDLSVELDRLSEESVNNDISSWTKGRSGEALSLLKKRFSHRPVQEKFVCLNCGFETHADEQAALNIARSWLFLRSQEYKKYQTNKTTGNTDKRAFVETWQSFYRKKLKEVWKPAV

SEQ ID NO: 49236 - protein, 980 aa, synthetic construct
  REGION 1..980: note = engineered CasX variant
QEIKRINKIRRRLVKDSNTKKAGKTGPMKTLLVRVMTPDLRERLENLRKKPENIPQPISNTSRANLNKLLTDYTEMKKAILHVYWEEFQKDPVGLMSRVAQPASKKIDQNKLKPEMDEKGNLTTAGFACSQCGQPLFVYKLEQVSEKGKAYTNYFGRCNVAEHEKLILLAQLKPEKDSDEAVTYSLGKFGQRALDFYSIHVTKESTHPVKPLAQIAGNRYASGPVGKALRDACMGTIASFLSKYQDIIIEHQKVVKGNQKRLESLRELAGKENLEYPSVTLPPQPHTKEGVDAYNEVIARVRMWVNLNLWQKLKLSRDDAKPLLRLKGFPSFPLVERQANEVDWWDMVCNVKKLINEKKEDGKVFWQNLAGYKRQEALRPYLSSEEDRKKGKKFARYQLGDLLLHLEKKHGERDWGKVYDEAWERIDKKVEGLSKHIKLEEERRSEDAQSKAALTDWLRAKASFVIEGLKEADKDEFCRCELKLQKWYGDLRGKPFAIEAENSILDISGFSKQYNCAFIWQKDGVKKLNLYLIINYFKGGKLRFKKIKPEAFEANRFYTVINKKSGEIVPMEVNFNFDDPNLIILPLAFGKRQGREFIWNDLLSLETGSLKLANGRVIEKTLYNRRTRQDEPALFVALTFERREVLDSSNIKPMSNLIGVDRGENIPAVIALTDPEGCPLSRFKDSLGNPTHILRIGESYKEKQRTIQAKKEVEQRRAGGYSRKYASKAKNLADDMVRNTARDLLYYAVTQDAMLIFENLSRGFGRQGKRTFMAERQYTRMEDWLTAKLAYEGLPSKTYLSKTLAQYTSKTCSNCGFTITSADYDRVLEKLKKTATGWMTTINGKELKVEGQITYYNRYKRQNVVKDLSVELDRLSEESVNNDISSWTKGRSGEALSLLKKRFSHRPVQEKFVCLNCGFETHADEQAALNIARSWLFLRSQEYKKYQTNKTTGNTDKRAFVETWQSFYRKKLKEVWKPAV

SEQ ID NO: 49237 - protein, 980 aa, synthetic construct
  REGION 1..980: note = engineered CasX variant
QEIKRINKIRRRLVKDSNTKKAGKTGPMKTLLVRVMTPDLRERLENLRKKPENIPQPISNTSRANLNKLLTDYTEMKKAILHVYWEEFQKDPVGLMSRVAQPASKKIDQNKLKPEMDEKGNLTTAGFACSQCGQPLFVYKLEQVSEKGKAYTNYFGRCNVAEHEKLILLAQLKPEKDSDEAVTYSLGKFGQRALDFYSIHVTKESTHPVKPLAQIAGNRYASGPVGKALRDACMGTIASFLSKYQDIIIEHQKVVKGNQKRLESLRELAGKENLEYPSVTLPPQPHTKEGVDAYNEVIARVRMWVNLNLWQKLKLSRDDAKPLLRLKGFPSFPLVERQANEVDWWDMVCNVKKLINEKKEDGKVFWQNLAGYKRQEALRPYLSSEEDRKKGKKFARYQLGDLLLHLEKKHGEYDWGKVYDEAWERIDKKVEGLSKHIKLEEERRSEDAQSKAALTDWLRAKASFVIEGLKEADKDEFCRCELKLQKWYGDLRGKPFAIEAENSILDISGFSKQYNCAFIWQKDGVKKLNLYLIINYFKGGKLRFKKIKPEAFEANRFYTVINKKSGEIVPMEVNFNFDDPNLIILPLAFGKRQGREFIWNDLLSLETGSLKLANGRVIEKTLYNRRTRQDEPALFVALTFERREVLDSSNIKPMSNLIGVDRGENIPAVIALTDPEGCPLSRFKDSLGNPTHILRIGESYKEKQRTIQAKKEVEQRRAGGYSRKYASKAKNLADDMVRNTARDLLYYAVTQDAMLIFENLSRGFGRQGKRTFMAERQYTRMEDWLTAKLAYEGLPSKTYLSKTLAQYTSKTCSNCGFTITSADYDRVLEKLKKTATGWMTTINGKELKVEGQITYYNRYKRQNVVKDLSVELDRLSEESVNNDISSWTKGRSGEALSLLKKRFSHRPVQEKFVCLNCGFETHADEQAALNIARSWLFLRSQEYKKYQTNKTTGNTDKRAFVETWQSFYRKKLKEVWKPAV

SEQ ID NO: 49238 - protein, 979 aa, synthetic construct
  REGION 1..979: note = engineered CasX variant
QEIKRINKIRRRLVKDSNTKKAGKTGPMKTLLVRVMTPDLRERLENLRKKPENIPQPISNTSRANLNKLLTDYTEMKKAILHVYWEEFQKDPVGLMSRVAQPASKKIDQNKLKPEMDEKGNLTTAGFACSQCGQPLFVYKLEQVSEKGKAYTNYFGRCNVAEHEKLILLAQLKPEKDSDEAVTYSLGKFGQRALDFYSIHVTKESTHPVKPLAQIAGNRYASGPVGKALRDACMGTIASFLSKYQDIIIEHQKVVKGNQKRLESLRELAGKENLEYPSVTLPPQPHTKEGVDAYNEVIARVRMWVNLNLWQKLKLSRDDAKPLLRLKGFPSFPLVERQANEVDWWDMVCNVKKLINEKKEDGKVFWQNLAGYKRQEALRPYLSSEEDRKKGKKFARYQLGDLLLHLEKKHGEDWGDVYDEAWERIDKKVEGLSKHIKLEEERRSEDAQSKAALTDWLRAKASFVIEGLKEADKDEFCRCELKLQKWYGDLRGKPFAIEAENSILDISGFSKQYNCAFIWQKDGVKKLNLYLIINYFKGGKLRFKKIKPEAFEANRFYTVINKKSGEIVPMEVNFNFDDPNLIILPLAFGKRQGREFIWNDLLSLETGSLKLANGRVIEKTLYNRRTRQDEPALFVALTFERREVLDSSNIKPMSNLIGVDRGENIPAVIALTDPEGCPLSRFKDSLGNPTHILRIGESYKEKQRTIQAKKEVEQRRAGGYSRKYASKAKNLADDMVRNTARDLLYYAVTQDAMLIFENLSRGFGRQGKRTFMAERQYTRMEDWLTAKLAYEGLPSKTYLSKTLAQYTSKTCSNCGFTITSADYDRVLEKLKKTATGWMTTINGKELKVEGQITYYNRYKRQNVVKDLSVELDRLSEESVNNDISSWTKGRSGEALSLLKKRFSHRPVQEKFVCLNCGFETHADEQAALNIARSWLFLRSQEYKKYQTNKTTGNTDKRAFVETWQSFYRKKLKEVWKPAV

SEQ ID NO: 49239 - protein, 979 aa, synthetic construct
  REGION 1..979: note = engineered CasX variant
QEIKRINKIRRRLVKDSNTKKAGKTGPMKTLLVRVMTPDLRERLENLRKKPENIPQPISNTSRANLNKLLTDYTEMKKAILHVYWEEFQKDPVGLMSRVAQPASKKIDQNKLKPEMDEKGNLTTAGFACSQCGQPLFVYKLEQVSEKGKAYTNYFGRCNVAEHEKLILLAQLKPEKDSDEAVTYSLGKFGQRALDFYSIHVTKESTHPVKPLAQIAGNRYASGPVGKALRDACMGTIASFLSKYQDIIIEHQKVVKGNQKRLESLRELAGKENLEYPSVTLPPQPHTKEGVDAYNEVIARVRMWVNLNLWQKLKLSRDDAKPLLRLKGFPSFPLVERQANEVDWWDMVCNVKKLINEKKEDGKVFWQNLAGYKRQEALRPYLSSEEDRKKGKKFARYQLGDLLLHLEKKHGEDWGKVYGEAWERIDKKVEGLSKHIKLEEERRSEDAQSKAALTDWLRAKASFVIEGLKEADKDEFCRCELKLQKWYGDLRGKPFAIEAENSILDISGFSKQYNCAFIWQKDGVKKLNLYLIINYFKGGKLRFKKIKPEAFEANRFYTVINKKSGEIVPMEVNFNFDDPNLIILPLAFGKRQGREFIWNDLLSLETGSLKLANGRVIEKTLYNRRTRQDEPALFVALTFERREVLDSSNIKPMSNLIGVDRGENIPAVIALTDPEGCPLSRFKDSLGNPTHILRIGESYKEKQRTIQAKKEVEQRRAGGYSRKYASKAKNLADDMVRNTARDLLYYAVTQDAMLIFENLSRGFGRQGKRTFMAERQYTRMEDWLTAKLAYEGLPSKTYLSKTLAQYTSKTCSNCGFTITSADYDRVLEKLKKTATGWMTTINGKELKVEGQITYYNRYKRQNVVKDLSVELDRLSEESVNNDISSWTKGRSGEALSLLKKRFSHRPVQEKFVCLNCGFETHADEQAALNIARSWLFLRSQEYKKYQTNKTTGNTDKRAFVETWQSFYRKKLKEVWKPAV

SEQ ID NO: 49240 - protein, 979 aa, synthetic construct
  REGION 1..979: note = engineered CasX variant
QEIKRINKIRRRLVKDSNTKKAGKTGPMKTLLVRVMTPDLRERLENLRKKPENIPQPISNTSRANLNKLLTDYTEMKKAILHVYWEEFQKDPVGLMSRVAQPASKKIDQNKLKPEMDEKGNLTTAGFACSQCGQPLFVYKLEQVSEKGKAYTNYFGRCNVAEHEKLILLAQLKPEKDSDEAVTYSLGKFGQRALDFYSIHVTKESTHPVKPLAQIAGNRYASGPVGKALRDACMGTIASFLSKYQDIIIEHQKVVKGNQKRLESLRELAGKENLEYPSVTLPPQPHTKEGVDAYNEVIARVRMWVNLNLWQKLKLSRDDAKPLLRLKGFPSFPLVERQANEVDWWDMVCNVKKLINEKKEDGKVFWQNLAGYKRQEALRPYLSSEEDRKKGKKFARYQLGDLLLHLEKKHGEDWGKVYDEAWERIDKKVEGLSKHIKLEEERRSEDAQSKAALTDWLRAKASFVIEGKKEADKDEFCRCELKLQKWYGDLRGKPFAIEAENSILDISGFSKQYNCAFIWQKDGVKKLNLYLIINYFKGGKLRFKKIKPEAFEANRFYTVINKKSGEIVPMEVNFNFDDPNLIILPLAFGKRQGREFIWNDLLSLETGSLKLANGRVIEKTLYNRRTRQDEPALFVALTFERREVLDSSNIKPMSNLIGVDRGENIPAVIALTDPEGCPLSRFKDSLGNPTHILRIGESYKEKQRTIQAKKEVEQRRAGGYSRKYASKAKNLADDMVRNTARDLLYYAVTQDAMLIFENLSRGFGRQGKRTFMAERQYTRMEDWLTAKLAYEGLPSKTYLSKTLAQYTSKTCSNCGFTITSADYDRVLEKLKKTATGWMTTINGKELKVEGQITYYNRYKRQNVVKDLSVELDRLSEESVNNDISSWTKGRSGEALSLLKKRFSHRPVQEKFVCLNCGFETHADEQAALNIARSWLFLRSQEYKKYQTNKTTGNTDKRAFVETWQSFYRKKLKEVWKPAV

SEQ ID NO: 49241 - protein, 979 aa, synthetic construct
  REGION 1..979: note = engineered CasX variant
QEIKRINKIRRRLVKDSNTKKAGKTGPMKTLLVRVMTPDLRERLENLRKKPENIPQPISNTSRANLNKLLTDYTEMKKAILHVYWEEFQKDPVGLMSRVAQPASKKIDQNKLKPEMDEKGNLTTAGFACSQCGQPLFVYKLEQVSEKGKAYTNYFGRCNVAEHEKLILLAQLKPEKDSDEAVTYSLGKFGQRALDFYSIHVTKESTHPVKPLAQIAGNRYASGPVGKALRDACMGTIASFLSKYQDIIIEHQKVVKGNQKRLESLRELAGKENLEYPSVTLPPQPHTKEGVDAYNEVIARVRMWVNLNLWQKLKLSRDDAKPLLRLKGFPSFPLVERQANEVDWWDMVCNVKKLINEKKEDGKVFWQNLAGYKRQEALRPYLSSEEDRKKGKKFARYQLGDLLLHLEKKHGEDWGKVYDEAWERIDKKVEGLSKHIKLEEERRSEDAQSKAALTDWLRAKASFVIEGSKEADKDEFCRCELKLQKWYGDLRGKPFAIEAENSILDISGFSKQYNCAFIWQKDGVKKLNLYLIINYFKGGKLRFKKIKPEAFEANRFYTVINKKSGEIVPMEVNFNFDDPNLIILPLAFGKRQGREFIWNDLLSLETGSLKLANGRVIEKTLYNRRTRQDEPALFVALTFERREVLDSSNIKPMSNLIGVDRGENIPAVIALTDPEGCPLSRFKDSLGNPTHILRIGESYKEKQRTIQAKKEVEQRRAGGYSRKYASKAKNLADDMVRNTARDLLYYAVTQDAMLIFENLSRGFGRQGKRTFMAERQYTRMEDWLTAKLAYEGLPSKTYLSKTLAQYTSKTCSNCGFTITSADYDRVLEKLKKTATGWMTTINGKELKVEGQITYYNRYKRQNVVKDLSVELDRLSEESVNNDISSWTKGRSGEALSLLKKRFSHRPVQEKFVCLNCGFETHADEQAALNIARSWLFLRSQEYKKYQTNKTTGNTDKRAFVETWQSFYRKKLKEVWKPAV

SEQ ID NO: 49242 - protein, 980 aa, synthetic construct
  REGION 1..980: note = engineered CasX variant
QEIKRINKIRRRLVKDSNTKKAGKTGPMKTLLVRVMTPDLRERLENLRKKPENIPQPISNTSRANLNKLLTDYTEMKKAILHVYWEEFQKDPVGLMSRVAQPASKKIDQNKLKPEMDEKGNLTTAGFACSQCGQPLFVYKLEQVSEKGKAYTNYFGRCNVAEHEKLILLAQLKPEKDSDEAVTYSLGKFGQRALDFYSIHVTKESTHPVKPLAQIAGNRYASGPVGKALRDACMGTIASFLSKYQDIIIEHQKVVKGNQKRLESLRELAGKENLEYPSVTLPPQPHTKEGVDAYNEVIARVRMWVNLNLWQKLKLSRDDAKPLLRLKGFPSFPLVERQANEVDWWDMVCNVKKLINEKKEDGKVFWQNLAGYKRQEALRPYLSSEEDRKKGKKFARYQLGDLLLHLEKKHGEDWGKVYDEAWERIDKKVEGLSKHIKLEEERRSEDAQSKAALTDWLRAKASFVIEGLKEADDKDEFCRCELKLQKWYGDLRGKPFAIEAENSILDISGFSKQYNCAFIWQKDGVKKLNLYLIINYFKGGKLRFKKIKPEAFEANRFYTVINKKSGEIVPMEVNFNFDDPNLIILPLAFGKRQGREFIWNDLLSLETGSLKLANGRVIEKTLYNRRTRQDEPALFVALTFERREVLDSSNIKPMSNLIGVDRGENIPAVIALTDPEGCPLSRFKDSLGNPTHILRIGESYKEKQRTIQAKKEVEQRRAGGYSRKYASKAKNLADDMVRNTARDLLYYAVTQDAMLIFENLSRGFGRQGKRTFMAERQYTRMEDWLTAKLAYEGLPSKTYLSKTLAQYTSKTCSNCGFTITSADYDRVLEKLKKTATGWMTTINGKELKVEGQITYYNRYKRQNVVKDLSVELDRLSEESVNNDISSWTKGRSGEALSLLKKRFSHRPVQEKFVCLNCGFETHADEQAALNIARSWLFLRSQEYKKYQTNKTTGNTDKRAFVETWQSFYRKKLKEVWKPAV

SEQ ID NO: 49243 - protein, 980 aa, synthetic construct
  REGION 1..980: note = engineered CasX variant
QEIKRINKIRRRLVKDSNTKKAGKTGPMKTLLVRVMTPDLRERLENLRKKPENIPQPISNTSRANLNKLLTDYTEMKKAILHVYWEEFQKDPVGLMSRVAQPASKKIDQNKLKPEMDEKGNLTTAGFACSQCGQPLFVYKLEQVSEKGKAYTNYFGRCNVAEHEKLILLAQLKPEKDSDEAVTYSLGKFGQRALDFYSIHVTKESTHPVKPLAQIAGNRYASGPVGKALRDACMGTIASFLSKYQDIIIEHQKVVKGNQKRLESLRELAGKENLEYPSVTLPPQPHTKEGVDAYNEVIARVRMWVNLNLWQKLKLSRDDAKPLLRLKGFPSFPLVERQANEVDWWDMVCNVKKLINEKKEDGKVFWQNLAGYKRQEALRPYLSSEEDRKKGKKFARYQLGDLLLHLEKKHGEDWGKVYDEAWERIDKKVEGLSKHIKLEEERRSEDAQSKAALTDWLRAKASFVIEGLKEADKDEFCRCELKLQKWYGDLRGKPFAIEAENSILDISGFSKQYNCAFIWQKDGVKKLNLYLIINYFKGGKLRFKKIKPEAFEANRFYTVINKKSGEIVPMEVNFNFDDPNLIILPLAFGKRQGREFIWNDLLSLETGSLKLANGRVIEKTLYNRRTRQDEPALFVALTFERREVLDSSNIKPMSNLIGVDRGENIPAVIALTDPEGCPLSRFKDSLGNPTHILRIGESYKEKQRTIQAKKEVEQRRAGGYSRKYASKAKNLADDMVRNTARDLLYYAVTQDAMLIFENLSRGFGRQGKRTFMAERQYTRMEDWLTAKLAYEGLPSKTYLSKTLAQYTSKTCSNCGFTITSADYDRVLEKLKKTATGWMTTINGKELKVEGQITYYNRYKRQNVVKDLSVELDRLSEESVNNDISSWTKGRSGNEALSLLKKRFSHRPVQEKFVCLNCGFETHADEQAALNIARSWLFLRSQEYKKYQTNKTTGNTDKRAFVETWQSFYRKKLKEVWKPAV

SEQ ID NO: 49244 - protein, 979 aa, synthetic construct
  REGION 1..979: note = engineered CasX variant
QEIKRINKIRRRLVKDSNTKKAGKTGPMKTLLVRVMTPDLRERLENLRKKPENIPQPISNTSRANLNKLLTDYTEMKKAILHVYWEEFQKDPVGLMSRVAQPASKKIDQNKLKPEMDEKGNLTTAGFACSQCGQPLFVYKLEQVSEKGKAYTNYFGRCNVAEHEKLILLAQLKPEKDSDEAVTYSLGKFGQRALDFYSIHVTKESTHPVKPLAQIAGNRYASGPVGKALRDACMGTIASFLSKYQDIIIEHQKVVKGNQKRLESLRELAGKENLEYPSVTLPPQPHTKEGVDAYNEVIARVRMWVNLNLWQKLKLSRDDAKPLLRLKGFPSFPLVERQANEVDWWDMVCNVKKLINEKKEDGKVFWQNLAGYKRQEALRPYLSSEEDRQKGKKFARYQLGDLLLHLEKKHGEDWGKVYDEAWERIDKKVEGLSKHIKLEEERRSEDAQSKAALTDWLRAKASFVIEGLKEADKDEFCRCELKLQKWYGDLRGKPFAIEAENSILDISGFSKQYNCAFIWQKDGVKKLNLYLIINYFKGGKLRFKKIKPEAFEANRFYTVINKKSGEIVPMEVNFNFDDPNLIILPLAFGKRQGREFIWNDLLSLETGSLKLANGRVIEKTLYNRRTRQDEPALFVALTFERREVLDSSNIKPMSNLIGVDRGENIPAVIALTDPEGCPLSRFKDSLGNPTHILRIGESYKEKQRTIQAKKEVEQRRAGGYSRKYASKAKNLADDMVRNTARDLLYYAVTQDAMLIFENLSRGFGRQGKRTFMAERQYTRMEDWLTAKLAYEGLPSKTYLSKTLAQYTSKTCSNCGFTITSADYDRVLEKLKKTATGWMTTINGKELKVEGQITYYNRYKRQNVVKDLSVELDRLSEESVNNDISSWTKGRSGEALSLLKKRFSHRPVQEKFVCLNCGFETHADEQAALNIARSWLFLRSQEYKKYQTNKTTGNTDKRAFVETWQSFYRKKLKEVWKPAV

SEQ ID NO: 49245 - protein, 979 aa, synthetic construct
  REGION 1..979: note = engineered CasX variant
QEIKRINKIRRRLVKDSNTKKAGKTGPMKTLLVRVMTPDLRERLENLRKKPENIPQPISNTSRANLNKLLTDYTEMKKAILHVYWEEFQKDPVGLMSRVAQPASKKIDQNKLKPEMDEKGNLTTAGFACSQCGQPLFVYKLEQVSEKGKAYTNYFGRCNVAEHEKLILLAQLKPEKDSDEAVTYSLGKFGQRALDFYSIHVTKESTHPVKPLAQIAGNRYASGPVGKALRDACMGTIASFLSKYQDIIIEHQKVVKGNQKRLESLRELAGKENLEYPSVTLPPQPHTKEGVDAYNEVIARVRMWVNLNLWQKLKLSRDDAKPLLRLKGFPSFPLVERQANEVDWWDMVCNVKKLINEKKEDGKVFWQNLAGYKRQEALRPYLSSEEDRKKGKKFARYQLGDLLLHLEKKHGEDWGKVYDEAWERIDKKVEGLSKHIKLEEERRSEDAQSKAALTDWLRAKASFVIEGLKEADKDEFCRCELKLQKWYGDLRGKPFAIEAENSILDISGFSKQYNCAFIWQKDGVKKLNLYLIINYFKGGKLRFKKIKPEAFEANRFYTVINKKSGEIVPMEVNFNFDDPNLIILPLAFGKRQGREFIWNDLLSLETGSLKLANGRVIEKTLYNRRTRQDEPALFVALTFERREVLDSSNIKPMSNLIGVDRGENIPAVIALTDPEGCPLSRFKDSLGNPTHILRIGESYKEKQRTIQAKKEVEQRRAGGYSRKYASKAKNLADDMVRNTARDLLYYAVTQDAMLIFENLSRGFGRQGKRTFMAERQYTRMEDWLTAKLAYEGLPSQTYLSKTLAQYTSKTCSNCGFTITSADYDRVLEKLKKTATGWMTTINGKELKVEGQITYYNRYKRQNVVKDLSVELDRLSEESVNNDISSWTKGRSGEALSLLKKRFSHRPVQEKFVCLNCGFETHADEQAALNIARSWLFLRSQEYKKYQTNKTTGNTDKRAFVETWQSFYRKKLKEVWKPAV

SEQ ID NO: 49246 - protein, 979 aa, synthetic construct
  REGION 1..979: note = engineered CasX variant
QEIKRINKIRRRLVKDSNTKKAGKTGPMKTLLVRVMTPDLRERLENLRKKPENIPQPISNTSRANLNKLLTDYTEMKKAILHVYWEEFQKDPVGLMSRVAQPASKKIDQNKLKPEMDEKGNLTTAGFACSQCGQPLFVYKLEQVSEKGKAYTNYFGRCNVAEHEKLILLAQLKPEKDSDEAVTYSLGKFGQRALDFYSIHVTKESTHPVKPLAQIAGNRYASGPVGKALRDACMGTIASFLSKYQDIIIEHQKVVKGNQKRLESLRELAGKENLEYPSVTLPPQPHTKEGVDAYNEVIARVRMWVNLNLWQKLKLSRDDAKPLLRLKGFPSFPLVERQANEVDWWDMVCNVKKLINEKKEDGKVFWQNLAGYKRQEALRPYLSSEEDRKKGKKFARYQLGDLLLHLEKKHGEDWGKVYDEAWERIDKKVEGLSKHIKLEEERRSEDAQSKAALTDWLRAKASFVIEGLKEADKDEFCRCELKLQKWYGDLRGKPFAIEAENSILDISGFSKQYNCAFIWQKDGVKKLNLYLIINYFKGGKLRFKKIKPEAFEANRFYTVINKKSGEIVPMEVNFNFDDPNLIILPLAFGKRQGREFIWNDLLSLETGSLKLANGRVIEKTLYNRRTRQDEPALFVALTFERREVLDSSNIKPMSNLIGVDRGENIPAVIALTDPEGCPLSRFKDSLGNPTHILRIGESYKEKQRTIQAKKEVEQRRAGGYSRKYASKAKNLADDMVRNTARDLLYYAVTQDAMLIFENLSRGFGRQGKRTFMAERQYTRMEDWLTAKLAYNGLPSKTYLSKTLAQYTSKTCSNCGFTITSADYDRVLEKLKKTATGWMTTINGKELKVEGQITYYNRYKRQNVVKDLSVELDRLSEESVNNDISSWTKGRSGEALSLLKKRFSHRPVQEKFVCLNCGFETHADEQAALNIARSWLFLRSQEYKKYQTNKTTGNTDKRAFVETWQSFYRKKLKEVWKPAV

SEQ ID NO: 49247 - protein, 979 aa, synthetic construct
  REGION 1..979: note = engineered CasX variant
QEIKRINKIRRRLVKDSNTKKAGKTGPMKTLLVRVMTPDLRERLENLRKKPENIPQPISNTSRANLNKLLTDYTEMKKAILHVYWEEFQKDPVGLMSRVAQPASKKIDQNKLKPEMDEKGNLTTAGFACSQCGQPLFVYKLEQVSEKGKAYTNYFGRCNVAEHEKLIQLAQLKPEKDSDEAVTYSLGKFGQRALDFYSIHVTKESTHPVKPLAQIAGNRYASGPVGKALRDACMGTIASFLSKYQDIIIEHQKVVKGNQKRLESLRELAGKENLEYPSVTLPPQPHTKEGVDAYNEVIARVRMWVNLNLWQKLKLSRDDAKPLLRLKGFPSFPLVERQANEVDWWDMVCNVKKLINEKKEDGKVFWQNLAGYKRQEALRPYLSSEEDRKKGKKFARYQLGDLLLHLEKKHGEDWGKVYDEAWERIDKKVEGLSKHIKLEEERRSEDAQSKAALTDWLRAKASFVIEGLKEADKDEFCRCELKLQKWYGDLRGKPFAIEAENSILDISGFSKQYNCAFIWQKDGVKKLNLYLIINYFKGGKLRFKKIKPEAFEANRFYTVINKKSGEIVPMEVNFNFDDPNLIILPLAFGKRQGREFIWNDLLSLETGSLKLANGRVIEKTLYNRRTRQDEPALFVALTFERREVLDSSNIKPMSNLIGVDRGENIPAVIALTDPEGCPLSRFKDSLGNPTHILRIGESYKEKQRTIQAKKEVEQRRAGGYSRKYASKAKNLADDMVRNTARDLLYYAVTQDAMLIFENLSRGFGRQGKRTFMAERQYTRMEDWLTAKLAYEGLPSKTYLSKTLAQYTSKTCSNCGFTITSADYDRVLEKLKKTATGWMTTINGKELKVEGQITYYNRYKRQNVVKDLSVELDRLSEESVNNDISSWTKGRSGEALSLLKKRFSHRPVQEKFVCLNCGFETHADEQAALNIARSWLFLRSQEYKKYQTNKTTGNTDKRAFVETWQSFYRKKLKEVWKPAV

SEQ ID NO: 49248 - protein, 979 aa, synthetic construct
  REGION 1..979: note = engineered CasX variant
QEIKRINKIRRRLVKDSNTKKAGKTGPMKTLLVRVMTPDLRERLENLRKKPENIPQPISNTSRANLNKLLTDYTEMKKAILHVYWEEFQKDPVGLMSRVAQPASKKIDQNKLKPEMDEKGNLTTAGFACSQCGQPLFVYKLEQVSEKGKAYTNYFGRCNVAEHEKLILLAQLKPEKDSDEAVTYSLGKFGQRALDFYSIHVTKESTHPVKPLAQIAGNRYASGPVGKALRDACMGTIASFLSKYQDIIIEHQKVVKGNQKRLESLRELAGKENLEYPSVTLPPQPHTKEGVDAYNEVIARVRMWVNLNLWQKLKLSRDDAKPLLRLKGFPSFPLVERQANEVDWWDMVCNVKKLINEKKEDGKVFWQNLAIYKRQEALRPYLSSEEDRKKGKKFARYQLGDLLLHLEKKHGEDWGKVYDEAWERIDKKVEGLSKHIKLEEERRSEDAQSKAALTDWLRAKASFVIEGLKEADKDEFCRCELKLQKWYGDLRGKPFAIEAENSILDISGFSKQYNCAFIWQKDGVKKLNLYLIINYFKGGKLRFKKIKPEAFEANRFYTVINKKSGEIVPMEVNFNFDDPNLIILPLAFGKRQGREFIWNDLLSLETGSLKLANGRVIEKTLYNRRTRQDEPALFVALTFERREVLDSSNIKPMSNLIGVDRGENIPAVIALTDPEGCPLSRFKDSLGNPTHILRIGESYKEKQRTIQAKKEVEQRRAGGYSRKYASKAKNLADDMVRNTARDLLYYAVTQDAMLIFENLSRGFGRQGKRTFMAERQYTRMEDWLTAKLAYEGLPSKTYLSKTLAQYTSKTCSNCGFTITSADYDRVLEKLKKTATGWMTTINGKELKVEGQITYYNRYKRQNVVKDLSVELDRLSEESVNNDISSWTKGRSGEALSLLKKRFSHRPVQEKFVCLNCGFETHADEQAALNIARSWLFLRSQEYKKYQTNKTTGNTDKRAFVETWQSFYRKKLKEVWKPAV

SEQ ID NO: 49249 - protein, 979 aa, synthetic construct
  REGION 1..979: note = engineered CasX variant
QEIKRINKIRRRLVKDSNTKKAGKTGPMKTLLVRVMTPDLRERLENLRKKPENIPQPISNTSRANLNKLLTDYTEMKKAILHVYWEEFQKDPVGLMSRVAQPASKKIDQNKLKPEMDEKGNLTTAGFACSQCGQPLFVYKLEQVSEKGKAYTNYFGRCNVAEHEKLILLAQLKPEKDSDEAVTYSLGKFGQRALDFYSIHVTKESTHPVKPLAQIAGNRYASGPVGKALRDACMGTIASFLSKYQDIIIEHQKVVKGNQKRLESLRELAGKENLEYPSVTLPPQPHTKEGVDAYNEVIARVRMWVNLNLWQKLKLSRDDAKPLLRLKGFPSFPLVERQANEVDWWDMVCNVKKLINEKKEDGKVFWQNLAGYKRQEALRPYLSSEEDREKGKKFARYQLGDLLLHLEKKHGEDWGKVYDEAWERIDKKVEGLSKHIKLEEERRSEDAQSKAALTDWLRAKASFVIEGLKEADKDEFCRCELKLQKWYGDLRGKPFAIEAENSILDISGFSKQYNCAFIWQKDGVKKLNLYLIINYFKGGKLRFKKIKPEAFEANRFYTVINKKSGEIVPMEVNFNFDDPNLIILPLAFGKRQGREFIWNDLLSLETGSLKLANGRVIEKTLYNRRTRQDEPALFVALTFERREVLDSSNIKPMSNLIGVDRGENIPAVIALTDPEGCPLSRFKDSLGNPTHILRIGESYKEKQRTIQAKKEVEQRRAGGYSRKYASKAKNLADDMVRNTARDLLYYAVTQDAMLIFENLSRGFGRQGKRTFMAERQYTRMEDWLTAKLAYEGLPSKTYLSKTLAQYTSKTCSNCGFTITSADYDRVLEKLKKTATGWMTTINGKELKVEGQITYYNRYKRQNVVKDLSVELDRLSEESVNNDISSWTKGRSGEALSLLKKRFSHRPVQEKFVCLNCGFETHADEQAALNIARSWLFLRSQEYKKYQTNKTTGNTDKRAFVETWQSFYRKKLKEVWKPAV

SEQ ID NO: 49250 - protein, 979 aa, synthetic construct
  REGION 1..979: note = engineered CasX variant
QEIKRINKIRRRLVKDSNTKKAGKTGPMKTLLVRVMTPDLRERLENLRKKPENIPQPISNTSRANLNKLLTDYTEMKKAILHVYWEEFQKDPVGLMSRVAQPASKKIDQNKLKPEMDEKGNLTTAGFACSQCGQPLFVYKLEQVSEKGKAYTNYFGRCNVAEHEKLILLAQLKPEKDSDEAVTYSLGKFGQRALDFYSIHVTKESTHPVKPLAQIAGNRYASGPVGKALRDACMGTIASFLSKYQDIIIEHQKVVKGNQKRLESLRELAGKENLEYPSVTLPPQPHTKEGVDAYNEVIARVRMWVNLNLWQKLKLSRDDAKPLLRLKGFPSFPLVERQANEVDWWDMVCNVKKLINEKKEDGKVFWQNLAGYKRQEALRPYLSSEEDRKKGKKFARYQLGDLLLHLEKKHGEDWGKVYDEAWERIDKKVEGLSKHIKLEEERRSEDAQSKAALTDWLRAKASFVIEGLKEADKDEFCRCELKLQKWYGDLRGKPFAIEAENSILDISGFSKQYNCAFIWQKDGVKKLNLYLIINYFKGGKLRFKKIKPEAFEANRFYTVINKKSGEIVIMEVNFNFDDPNLIILPLAFGKRQGREFIWNDLLSLETGSLKLANGRVIEKTLYNRRTRQDEPALFVALTFERREVLDSSNIKPMSNLIGVDRGENIPAVIALTDPEGCPLSRFKDSLGNPTHILRIGESYKEKQRTIQAKKEVEQRRAGGYSRKYASKAKNLADDMVRNTARDLLYYAVTQDAMLIFENLSRGFGRQGKRTFMAERQYTRMEDWLTAKLAYEGLPSKTYLSKTLAQYTSKTCSNCGFTITSADYDRVLEKLKKTATGWMTTINGKELKVEGQITYYNRYKRQNVVKDLSVELDRLSEESVNNDISSWTKGRSGEALSLLKKRFSHRPVQEKFVCLNCGFETHADEQAALNIARSWLFLRSQEYKKYQTNKTTGNTDKRAFVETWQSFYRKKLKEVWKPAV

SEQ ID NO: 49251 - protein, 978 aa, synthetic construct
  REGION 1..978: note = engineered CasX variant
QEIKRINKIRRRLVKDSNTKKAGKTGPMKTLLVRVMTPDLRERLENLRKKPENIPQPISNTSRANLNKLLTDYTEMKKAILHVYWEEFQKDPVGLMSRVAQPASKKIDQNKLKPEMDEKGNLTTAGFACSQCGQPLFVYKLEQVSEKGKAYTNYFGRCNVAEHEKLILLAQLKPEKDSDEAVTYSLGKFGQRALDFYSIHVTKESTHPVKPLAQIAGNRYASGPVGKALRGACMGTIASFLSKYQDIIIEHQKVVKGNQKRLESLRELAGKENLEYPSVTLPPQPHTKEGVDAYNEVIARVRMWVNLNLWQKLKLSRDDAKPLLRLKGFPSFPLVERQANEVDWWDMVCNVKKLINEKKEDGKVFWQNLAGYKRQEALRPYLSSEEDRKKGKKFARYQLGDLLLHLEKKHGEDWGKVYDEAWERIDKKVEGLSKHIKLEEERRSEDAQSKAALTDWLRAKASFVIEGLKEADKDEFCRCELKLQKWYGDLRGKPFAIEAENSILDISGFSKQYNCAFIWQKDGVKKLNLYLIINYFKGGKLRFKKIKPEAFEANRFYTVINKKSGEIVPMEVNFNFDDPNLIILPLAFGKRQGREFIWNDLLSLETGSLKLANGRVIEKTLYNRRTRQDEPALFVALTFERREVLDSSNIKPMNLIGVDRGENIPAVIALTDPEGCPLSRFKDSLGNPTHILRIRESYKEKQRTIQAKKEVEQRRAGGYSRKYASKAKNLADDMVRNTARDLLYYAVTQDAMLIFENLSRGFGRQGKRTFMAERQYTRMEDWLTAKLAYEGLPSKTYLSKTLAQYTSKTCSNCGFTITSADYDRVLEKLKKTATGWMTTINGKELKVEGQITYYNRYKRQNVVKDLSVELDRLSEESVNNDISSWTKGRSGEALSLLKKRFSHRPVQEKFVCLNCGFETHADEQAALNIARSWLFLRSQEYKKYQTNKTTGNTDKRAFVETWQSFYRKKLKEVWKPAV

SEQ ID NO: 49252 - protein, 978 aa, synthetic construct
  REGION 1..978: note = engineered CasX variant
QEIKRINKIRRRLVKDSNTKKAGKTGPMKTLLVRVMTPDLRERLENLRKKPENIPQPISNTSRANLNKLLTDYTEMKKAILHVYWEEFQKDPVGLMSRVAQPASKKIDQNKLKPEMDEKGNLTTAGFACSQCGQPLFVYKLEQVSEKGKAYTNYFGRCNVAEHEKLILLAQLKPEKDSDEAVTYSLGKFGQRALDFYSIHVTKESTHPVKPLAQIAGNRYASGPVGKALRDACMGTIASFLSKYQDIIIEHQKVVKGNQKRLESLRELAGKENLEYPSVTLPPQPHTKEGVDAYNEVIARVRMWVNLNLWQKLKLSRDDAKPLLRLKNFPSFPLVERQANEVDWWDMVCNVKKLINEKKEDGKVFWQNLAGYKRQEALRPYLSSEEDRKKGKKFARYQLGDLLLHLEKKHGEDWGKVYDEAWERIDKKVEGLSKHIKLEEERRSEDAQSKAALTDWLRAKASFVIEGLKEADKDEFCRCELKLQKWYGDLRGKPFAIEAENSILDISGFSKQYNCAFIWQKDGVKKLNLYLIINYFKGGKLRFKKIKPEAFEANRFYTVINKKSGEIVPMEVNFNFDDPNLIILPLAFGKRQGREFIWNDLLSLETGSLKLANGRVIEKTLYNRRTRQDEPALFVALTFERREVLDSSNIKPMNLIGVDRGENIPAVIALTDPEGCPLSRFKDSLGNPTHILRIRESYKEKQRTIQAKKEVEQRRAGGYSRKYASKAKNLADDMVRNTARDLLYYAVTQDAMLIFENLSRGFGRQGKRTFMAERQYTRMEDWLTAKLAYEGLPSKTYLSKTLAQYTSKTCSNCGFTITSADYDRVLEKLKKTATGWMTTINGKELKVEGQITYYNRYKRQNVVKDLSVELDRLSEESVNNDISSWTKGRSGEALSLLKKRFSHRPVQEKFVCLNCGFETHADEQAALNIARSWLFLRSQEYKKYQTNKTTGNTDKRAFVETWQSFYRKKLKEVWKPAV

SEQ ID NO: 49253 - protein, 978 aa, synthetic construct
  REGION 1..978: note = engineered CasX variant
QEIKRINKIRRRLVKDSNTKKAGKTGPMKTLLVRVMTPDLRERLENLRKKPENIPQPISNTSRANLNKLLTDYTEMKKAILHVYWEEFQKDPVGLMSRVAQPASKKIDQNKLKPEMDEKGNLTTAGFACSQCGQPLFVYKLEQVSEKGKAYTNYFGRCNVAEHEKLILLAQLKPEKDSDEAVTYSLGKFGQRALDFYSIHVTKESTHPVKPLAQIAGNRYASGPVGKALRDACMGTIASFLSKYQDIIIEHQKVVKGNQKRLESLRELAGKENLEYPSVTLPPQPHTKEGVDAYNEVIARVRMWVNLNLWQKLKLSRDDAKPLLRLKGFPSFPLVERQANEVDWWDMVCNVKKLINEKKEDGKVFWQNLAGYKRQEALRPYLSSEEDRKKGKKFARYQLGDLLNHLEKKHGEDWGKVYDEAWERIDKKVEGLSKHIKLEEERRSEDAQSKAALTDWLRAKASFVIEGLKEADKDEFCRCELKLQKWYGDLRGKPFAIEAENSILDISGFSKQYNCAFIWQKDGVKKLNLYLIINYFKGGKLRFKKIKPEAFEANRFYTVINKKSGEIVPMEVNFNFDDPNLIILPLAFGKRQGREFIWNDLLSLETGSLKLANGRVIEKTLYNRRTRQDEPALFVALTFERREVLDSSNIKPMNLIGVDRGENIPAVIALTDPEGCPLSRFKDSLGNPTHILRIRESYKEKQRTIQAKKEVEQRRAGGYSRKYASKAKNLADDMVRNTARDLLYYAVTQDAMLIFENLSRGFGRQGKRTFMAERQYTRMEDWLTAKLAYEGLPSKTYLSKTLAQYTSKTCSNCGFTITSADYDRVLEKLKKTATGWMTTINGKELKVEGQITYYNRYKRQNVVKDLSVELDRLSEESVNNDISSWTKGRSGEALSLLKKRFSHRPVQEKFVCLNCGFETHADEQAALNIARSWLFLRSQEYKKYQTNKTTGNTDKRAFVETWQSFYRKKLKEVWKPAV

SEQ ID NO: 49254 - protein, 978 aa, synthetic construct
  REGION 1..978: note = engineered CasX variant
QEIKRINKIRRRLVKDSNTKKAGKTGPMKTLLVRVMTPDLRERLENLRKKPENIPQPISNTSRANLNKLLTDYTEMKKAILHVYWEEFQKDPVGLMSRVAQPASKKIDQNKLKPEMDEKGNLTTAGFACSQCGQPLFVYKLEQVSEKGKAYTNYFGRCNVAEHEKLILLAQLKPEKDSDEAVTYSLGKFGQRALDFYSIHVTKESTHPVKPLAQIAGNRYASGPVGKALRDACMGTIASFLSKYQDIIIEHQKVVKGNQKRLESLRELAGKENLEYPSVTLPPQPHTKEGVDAYNEVIARVRMWVNLNLWQKLKLSRDDAKPLLRLKGFPSFPLVERQANEVDWWDMVCNVKKLINEKKEDGKVFWQNLAGYKRQEALRPYLSSEEDRKKGKKFARYQLGDLLWHLEKKHGEDWGKVYDEAWERIDKKVEGLSKHIKLEEERRSEDAQSKAALTDWLRAKASFVIEGLKEADKDEFCRCELKLQKWYGDLRGKPFAIEAENSILDISGFSKQYNCAFIWQKDGVKKLNLYLIINYFKGGKLRFKKIKPEAFEANRFYTVINKKSGEIVPMEVNFNFDDPNLIILPLAFGKRQGREFIWNDLLSLETGSLKLANGRVIEKTLYNRRTRQDEPALFVALTFERREVLDSSNIKPMNLIGVDRGENIPAVIALTDPEGCPLSRFKDSLGNPTHILRIRESYKEKQRTIQAKKEVEQRRAGGYSRKYASKAKNLADDMVRNTARDLLYYAVTQDAMLIFENLSRGFGRQGKRTFMAERQYTRMEDWLTAKLAYEGLPSKTYLSKTLAQYTSKTCSNCGFTITSADYDRVLEKLKKTATGWMTTINGKELKVEGQITYYNRYKRQNVVKDLSVELDRLSEESVNNDISSWTKGRSGEALSLLKKRFSHRPVQEKFVCLNCGFETHADEQAALNIARSWLFLRSQEYKKYQTNKTTGNTDKRAFVETWQSFYRKKLKEVWKPAV

SEQ ID NO: 49255 - protein, 978 aa, synthetic construct
  REGION 1..978: note = engineered CasX variant
QEIKRINKIRRRLVKDSNTKKAGKTGPMKTLLVRVMTPDLRERLENLRKKPENIPQPISNTSRANLNKLLTDYTEMKKAILHVYWEEFQKDPVGLMSRVAQPASKKIDQNKLKPEMDEKGNLTTAGFACSQCGQPLFVYKLEQVSEKGKAYTNYFGRCNVAEHEKLILLAQLKPEKDSDEAVTYSLGKFGQRALDFYSIHVTKESTHPVKPLAQIAGNRYASGPVGKALRDACMGTIASFLSKYQDIIIEHQKVVKGNQKRLESLRELAGKENLEYPSVTLPPQPHTKEGVDAYNEVIARVRMWVNLNLWQKLKLSRDDAKPLLRLKGFPSFPLVERQANEVDWWDMVCNVKKLINEKKEDGKVFWQNLAGYKRQEALRPYLSSEEDRKKGKKFARYQLGDLLLHLYKKHGEDWGKVYDEAWERIDKKVEGLSKHIKLEEERRSEDAQSKAALTDWLRAKASFVIEGLKEADKDEFCRCELKLQKWYGDLRGKPFAIEAENSILDISGFSKQYNCAFIWQKDGVKKLNLYLIINYFKGGKLRFKKIKPEAFEANRFYTVINKKSGEIVPMEVNFNFDDPNLIILPLAFGKRQGREFIWNDLLSLETGSLKLANGRVIEKTLYNRRTRQDEPALFVALTFERREVLDSSNIKPMNLIGVDRGENIPAVIALTDPEGCPLSRFKDSLGNPTHILRIRESYKEKQRTIQAKKEVEQRRAGGYSRKYASKAKNLADDMVRNTARDLLYYAVTQDAMLIFENLSRGFGRQGKRTFMAERQYTRMEDWLTAKLAYEGLPSKTYLSKTLAQYTSKTCSNCGFTITSADYDRVLEKLKKTATGWMTTINGKELKVEGQITYYNRYKRQNVVKDLSVELDRLSEESVNNDISSWTKGRSGEALSLLKKRFSHRPVQEKFVCLNCGFETHADEQAALNIARSWLFLRSQEYKKYQTNKTTGNTDKRAFVETWQSFYRKKLKEVWKPAV

SEQ ID NO: 49256 - protein, 978 aa, synthetic construct
  REGION 1..978: note = engineered CasX variant
QEIKRINKIRRRLVKDSNTKKAGKTGPMKTLLVRVMTPDLRERLENLRKKPENIPQPISNTSRANLNKLLTDYTEMKKAILHVYWEEFQKDPVGLMSRVAQPASKKIDQNKLKPEMDEKGNLTTAGFACSQCGQPLFVYKLEQVSEKGKAYTNYFGRCNVAEHEKLILLAQLKPEKDSDEAVTYSLGKFGQRALDFYSIHVTKESTHPVKPLAQIAGNRYASGPVGKALRDACMGTIASFLSKYQDIIIEHQKVVKGNQKRLESLRELAGKENLEYPSVTLPPQPHTKEGVDAYNEVIARVRMWVNLNLWQKLKLSRDDAKPLLRLKGFPSFPLVERQANEVDWWDMVCNVKKLINEKKEDGKVFWQNLAGYKRQEALRPYLSSEEDRKKGKKFARYQLGDLLLHLEKKHPEDWGKVYDEAWERIDKKVEGLSKHIKLEEERRSEDAQSKAALTDWLRAKASFVIEGLKEADKDEFCRCELKLQKWYGDLRGKPFAIEAENSILDISGFSKQYNCAFIWQKDGVKKLNLYLIINYFKGGKLRFKKIKPEAFEANRFYTVINKKSGEIVPMEVNFNFDDPNLIILPLAFGKRQGREFIWNDLLSLETGSLKLANGRVIEKTLYNRRTRQDEPALFVALTFERREVLDSSNIKPMNLIGVDRGENIPAVIALTDPEGCPLSRFKDSLGNPTHILRIRESYKEKQRTIQAKKEVEQRRAGGYSRKYASKAKNLADDMVRNTARDLLYYAVTQDAMLIFENLSRGFGRQGKRTFMAERQYTRMEDWLTAKLAYEGLPSKTYLSKTLAQYTSKTCSNCGFTITSADYDRVLEKLKKTATGWMTTINGKELKVEGQITYYNRYKRQNVVKDLSVELDRLSEESVNNDISSWTKGRSGEALSLLKKRFSHRPVQEKFVCLNCGFETHADEQAALNIARSWLFLRSQEYKKYQTNKTTGNTDKRAFVETWQSFYRKKLKEVWKPAV

SEQ ID NO: 49257 - protein, 979 aa, synthetic construct
  REGION 1..979: note = engineered CasX variant
QEIKRINKIRRRLVKDSNTKKAGKTGPMKTLLVRVMTPDLRERLENLRKKPENIPQPISNTSRANLNKLLTDYTEMKKAILHVYWEEFQKDPVGLMSRVAQPASKKIDQNKLKPEMDEKGNLTTAGFACSQCGQPLFVYKLEQVSEKGKAYTNYFGRCNVAEHEKLILLAQLKPEKDSDEAVTYSLGKFGQRALDFYSIHVTKESTHPVKPLAQIAGNRYASGPVGKALRDACMGTIASFLSKYQDIIIEHQKVVKGNQKRLESLRELAGKENLEYPSVTLPPQPHTKEGVDAYNEVIARVRMWVNLNLWQKLKLSRDDAKPLLRLKGFPSFPLVERQANEVDWWDMVCNVKKLINEKKEDGKVFWQNLAGYKRQEALRPYLSSEEDRKKGKKFARYQLGDLLLHLEKKHGERDWGKVYDEAWERIDKKVEGLSKHIKLEEERRSEDAQSKAALTDWLRAKASFVIEGLKEADKDEFCRCELKLQKWYGDLRGKPFAIEAENSILDISGFSKQYNCAFIWQKDGVKKLNLYLIINYFKGGKLRFKKIKPEAFEANRFYTVINKKSGEIVPMEVNFNFDDPNLIILPLAFGKRQGREFIWNDLLSLETGSLKLANGRVIEKTLYNRRTRQDEPALFVALTFERREVLDSSNIKPMNLIGVDRGENIPAVIALTDPEGCPLSRFKDSLGNPTHILRIRESYKEKQRTIQAKKEVEQRRAGGYSRKYASKAKNLADDMVRNTARDLLYYAVTQDAMLIFENLSRGFGRQGKRTFMAERQYTRMEDWLTAKLAYEGLPSKTYLSKTLAQYTSKTCSNCGFTITSADYDRVLEKLKKTATGWMTTINGKELKVEGQITYYNRYKRQNVVKDLSVELDRLSEESVNNDISSWTKGRSGEALSLLKKRFSHRPVQEKFVCLNCGFETHADEQAALNIARSWLFLRSQEYKKYQTNKTTGNTDKRAFVETWQSFYRKKLKEVWKPAV

SEQ ID NO: 49258 - protein, 979 aa, synthetic construct
  REGION 1..979: note = engineered CasX variant
QEIKRINKIRRRLVKDSNTKKAGKTGPMKTLLVRVMTPDLRERLENLRKKPENIPQPISNTSRANLNKLLTDYTEMKKAILHVYWEEFQKDPVGLMSRVAQPASKKIDQNKLKPEMDEKGNLTTAGFACSQCGQPLFVYKLEQVSEKGKAYTNYFGRCNVAEHEKLILLAQLKPEKDSDEAVTYSLGKFGQRALDFYSIHVTKESTHPVKPLAQIAGNRYASGPVGKALRDACMGTIASFLSKYQDIIIEHQKVVKGNQKRLESLRELAGKENLEYPSVTLPPQPHTKEGVDAYNEVIARVRMWVNLNLWQKLKLSRDDAKPLLRLKGFPSFPLVERQANEVDWWDMVCNVKKLINEKKEDGKVFWQNLAGYKRQEALRPYLSSEEDRKKGKKFARYQLGDLLLHLEKKHGEYDWGKVYDEAWERIDKKVEGLSKHIKLEEERRSEDAQSKAALTDWLRAKASFVIEGLKEADKDEFCRCELKLQKWYGDLRGKPFAIEAENSILDISGFSKQYNCAFIWQKDGVKKLNLYLIINYFKGGKLRFKKIKPEAFEANRFYTVINKKSGEIVPMEVNFNFDDPNLIILPLAFGKRQGREFIWNDLLSLETGSLKLANGRVIEKTLYNRRTRQDEPALFVALTFERREVLDSSNIKPMNLIGVDRGENIPAVIALTDPEGCPLSRFKDSLGNPTHILRIRESYKEKQRTIQAKKEVEQRRAGGYSRKYASKAKNLADDMVRNTARDLLYYAVTQDAMLIFENLSRGFGRQGKRTFMAERQYTRMEDWLTAKLAYEGLPSKTYLSKTLAQYTSKTCSNCGFTITSADYDRVLEKLKKTATGWMTTINGKELKVEGQITYYNRYKRQNVVKDLSVELDRLSEESVNNDISSWTKGRSGEALSLLKKRFSHRPVQEKFVCLNCGFETHADEQAALNIARSWLFLRSQEYKKYQTNKTTGNTDKRAFVETWQSFYRKKLKEVWKPAV

SEQ ID NO: 49259 - protein, 978 aa, synthetic construct
  REGION 1..978: note = engineered CasX variant
QEIKRINKIRRRLVKDSNTKKAGKTGPMKTLLVRVMTPDLRERLENLRKKPENIPQPISNTSRANLNKLLTDYTEMKKAILHVYWEEFQKDPVGLMSRVAQPASKKIDQNKLKPEMDEKGNLTTAGFACSQCGQPLFVYKLEQVSEKGKAYTNYFGRCNVAEHEKLILLAQLKPEKDSDEAVTYSLGKFGQRALDFYSIHVTKESTHPVKPLAQIAGNRYASGPVGKALRDACMGTIASFLSKYQDIIIEHQKVVKGNQKRLESLRELAGKENLEYPSVTLPPQPHTKEGVDAYNEVIARVRMWVNLNLWQKLKLSRDDAKPLLRLKGFPSFPLVERQANEVDWWDMVCNVKKLINEKKEDGKVFWQNLAGYKRQEALRPYLSSEEDRKKGKKFARYQLGDLLLHLEKKHGEDWGDVYDEAWERIDKKVEGLSKHIKLEEERRSEDAQSKAALTDWLRAKASFVIEGLKEADKDEFCRCELKLQKWYGDLRGKPFAIEAENSILDISGFSKQYNCAFIWQKDGVKKLNLYLIINYFKGGKLRFKKIKPEAFEANRFYTVINKKSGEIVPMEVNFNFDDPNLIILPLAFGKRQGREFIWNDLLSLETGSLKLANGRVIEKTLYNRRTRQDEPALFVALTFERREVLDSSNIKPMNLIGVDRGENIPAVIALTDPEGCPLSRFKDSLGNPTHILRIRESYKEKQRTIQAKKEVEQRRAGGYSRKYASKAKNLADDMVRNTARDLLYYAVTQDAMLIFENLSRGFGRQGKRTFMAERQYTRMEDWLTAKLAYEGLPSKTYLSKTLAQYTSKTCSNCGFTITSADYDRVLEKLKKTATGWMTTINGKELKVEGQITYYNRYKRQNVVKDLSVELDRLSEESVNNDISSWTKGRSGEALSLLKKRFSHRPVQEKFVCLNCGFETHADEQAALNIARSWLFLRSQEYKKYQTNKTTGNTDKRAFVETWQSFYRKKLKEVWKPAV

SEQ ID NO: 49260 - protein, 978 aa, synthetic construct
  REGION 1..978: note = engineered CasX variant
QEIKRINKIRRRLVKDSNTKKAGKTGPMKTLLVRVMTPDLRERLENLRKKPENIPQPISNTSRANLNKLLTDYTEMKKAILHVYWEEFQKDPVGLMSRVAQPASKKIDQNKLKPEMDEKGNLTTAGFACSQCGQPLFVYKLEQVSEKGKAYTNYFGRCNVAEHEKLILLAQLKPEKDSDEAVTYSLGKFGQRALDFYSIHVTKESTHPVKPLAQIAGNRYASGPVGKALRDACMGTIASFLSKYQDIIIEHQKVVKGNQKRLESLRELAGKENLEYPSVTLPPQPHTKEGVDAYNEVIARVRMWVNLNLWQKLKLSRDDAKPLLRLKGFPSFPLVERQANEVDWWDMVCNVKKLINEKKEDGKVFWQNLAGYKRQEALRPYLSSEEDRKKGKKFARYQLGDLLLHLEKKHGEDWGKVYGEAWERIDKKVEGLSKHIKLEEERRSEDAQSKAALTDWLRAKASFVIEGLKEADKDEFCRCELKLQKWYGDLRGKPFAIEAENSILDISGFSKQYNCAFIWQKDGVKKLNLYLIINYFKGGKLRFKKIKPEAFEANRFYTVINKKSGEIVPMEVNFNFDDPNLIILPLAFGKRQGREFIWNDLLSLETGSLKLANGRVIEKTLYNRRTRQDEPALFVALTFERREVLDSSNIKPMNLIGVDRGENIPAVIALTDPEGCPLSRFKDSLGNPTHILRIRESYKEKQRTIQAKKEVEQRRAGGYSRKYASKAKNLADDMVRNTARDLLYYAVTQDAMLIFENLSRGFGRQGKRTFMAERQYTRMEDWLTAKLAYEGLPSKTYLSKTLAQYTSKTCSNCGFTITSADYDRVLEKLKKTATGWMTTINGKELKVEGQITYYNRYKRQNVVKDLSVELDRLSEESVNNDISSWTKGRSGEALSLLKKRFSHRPVQEKFVCLNCGFETHADEQAALNIARSWLFLRSQEYKKYQTNKTTGNTDKRAFVETWQSFYRKKLKEVWKPAV

SEQ ID NO: 49261 - protein, 978 aa, synthetic construct
  REGION 1..978: note = engineered CasX variant
QEIKRINKIRRRLVKDSNTKKAGKTGPMKTLLVRVMTPDLRERLENLRKKPENIPQPISNTSRANLNKLLTDYTEMKKAILHVYWEEFQKDPVGLMSRVAQPASKKIDQNKLKPEMDEKGNLTTAGFACSQCGQPLFVYKLEQVSEKGKAYTNYFGRCNVAEHEKLILLAQLKPEKDSDEAVTYSLGKFGQRALDFYSIHVTKESTHPVKPLAQIAGNRYASGPVGKALRDACMGTIASFLSKYQDIIIEHQKVVKGNQKRLESLRELAGKENLEYPSVTLPPQPHTKEGVDAYNEVIARVRMWVNLNLWQKLKLSRDDAKPLLRLKGFPSFPLVERQANEVDWWDMVCNVKKLINEKKEDGKVFWQNLAGYKRQEALRPYLSSEEDRKKGKKFARYQLGDLLLHLEKKHGEDWGKVYDEAWERIDKKVEGLSKHIKLEEERRSEDAQSKAALTDWLRAKASFVIEGKKEADKDEFCRCELKLQKWYGDLRGKPFAIEAENSILDISGFSKQYNCAFIWQKDGVKKLNLYLIINYFKGGKLRFKKIKPEAFEANRFYTVINKKSGEIVPMEVNFNFDDPNLIILPLAFGKRQGREFIWNDLLSLETGSLKLANGRVIEKTLYNRRTRQDEPALFVALTFERREVLDSSNIKPMNLIGVDRGENIPAVIALTDPEGCPLSRFKDSLGNPTHILRIRESYKEKQRTIQAKKEVEQRRAGGYSRKYASKAKNLADDMVRNTARDLLYYAVTQDAMLIFENLSRGFGRQGKRTFMAERQYTRMEDWLTAKLAYEGLPSKTYLSKTLAQYTSKTCSNCGFTITSADYDRVLEKLKKTATGWMTTINGKELKVEGQITYYNRYKRQNVVKDLSVELDRLSEESVNNDISSWTKGRSGEALSLLKKRFSHRPVQEKFVCLNCGFETHADEQAALNIARSWLFLRSQEYKKYQTNKTTGNTDKRAFVETWQSFYRKKLKEVWKPAV

SEQ ID NO: 49262 - protein, 978 aa, synthetic construct
  REGION 1..978: note = engineered CasX variant
QEIKRINKIRRRLVKDSNTKKAGKTGPMKTLLVRVMTPDLRERLENLRKKPENIPQPISNTSRANLNKLLTDYTEMKKAILHVYWEEFQKDPVGLMSRVAQPASKKIDQNKLKPEMDEKGNLTTAGFACSQCGQPLFVYKLEQVSEKGKAYTNYFGRCNVAEHEKLILLAQLKPEKDSDEAVTYSLGKFGQRALDFYSIHVTKESTHPVKPLAQIAGNRYASGPVGKALRDACMGTIASFLSKYQDIIIEHQKVVKGNQKRLESLRELAGKENLEYPSVTLPPQPHTKEGVDAYNEVIARVRMWVNLNLWQKLKLSRDDAKPLLRLKGFPSFPLVERQANEVDWWDMVCNVKKLINEKKEDGKVFWQNLAGYKRQEALRPYLSSEEDRKKGKKFARYQLGDLLLHLEKKHGEDWGKVYDEAWERIDKKVEGLSKHIKLEEERRSEDAQSKAALTDWLRAKASFVIEGSKEADKDEFCRCELKLQKWYGDLRGKPFAIEAENSILDISGFSKQYNCAFIWQKDGVKKLNLYLIINYFKGGKLRFKKIKPEAFEANRFYTVINKKSGEIVPMEVNFNFDDPNLIILPLAFGKRQGREFIWNDLLSLETGSLKLANGRVIEKTLYNRRTRQDEPALFVALTFERREVLDSSNIKPMNLIGVDRGENIPAVIALTDPEGCPLSRFKDSLGNPTHILRIRESYKEKQRTIQAKKEVEQRRAGGYSRKYASKAKNLADDMVRNTARDLLYYAVTQDAMLIFENLSRGFGRQGKRTFMAERQYTRMEDWLTAKLAYEGLPSKTYLSKTLAQYTSKTCSNCGFTITSADYDRVLEKLKKTATGWMTTINGKELKVEGQITYYNRYKRQNVVKDLSVELDRLSEESVNNDISSWTKGRSGEALSLLKKRFSHRPVQEKFVCLNCGFETHADEQAALNIARSWLFLRSQEYKKYQTNKTTGNTDKRAFVETWQSFYRKKLKEVWKPAV

SEQ ID NO: 49263 - protein, 979 aa, synthetic construct
  REGION 1..979: note = engineered CasX variant
QEIKRINKIRRRLVKDSNTKKAGKTGPMKTLLVRVMTPDLRERLENLRKKPENIPQPISNTSRANLNKLLTDYTEMKKAILHVYWEEFQKDPVGLMSRVAQPASKKIDQNKLKPEMDEKGNLTTAGFACSQCGQPLFVYKLEQVSEKGKAYTNYFGRCNVAEHEKLILLAQLKPEKDSDEAVTYSLGKFGQRALDFYSIHVTKESTHPVKPLAQIAGNRYASGPVGKALRDACMGTIASFLSKYQDIIIEHQKVVKGNQKRLESLRELAGKENLEYPSVTLPPQPHTKEGVDAYNEVIARVRMWVNLNLWQKLKLSRDDAKPLLRLKGFPSFPLVERQANEVDWWDMVCNVKKLINEKKEDGKVFWQNLAGYKRQEALRPYLSSEEDRKKGKKFARYQLGDLLLHLEKKHGEDWGKVYDEAWERIDKKVEGLSKHIKLEEERRSEDAQSKAALTDWLRAKASFVIEGLKEADDKDEFCRCELKLQKWYGDLRGKPFAIEAENSILDISGFSKQYNCAFIWQKDGVKKLNLYLIINYFKGGKLRFKKIKPEAFEANRFYTVINKKSGEIVPMEVNFNFDDPNLIILPLAFGKRQGREFIWNDLLSLETGSLKLANGRVIEKTLYNRRTRQDEPALFVALTFERREVLDSSNIKPMNLIGVDRGENIPAVIALTDPEGCPLSRFKDSLGNPTHILRIRESYKEKQRTIQAKKEVEQRRAGGYSRKYASKAKNLADDMVRNTARDLLYYAVTQDAMLIFENLSRGFGRQGKRTFMAERQYTRMEDWLTAKLAYEGLPSKTYLSKTLAQYTSKTCSNCGFTITSADYDRVLEKLKKTATGWMTTINGKELKVEGQITYYNRYKRQNVVKDLSVELDRLSEESVNNDISSWTKGRSGEALSLLKKRFSHRPVQEKFVCLNCGFETHADEQAALNIARSWLFLRSQEYKKYQTNKTTGNTDKRAFVETWQSFYRKKLKEVWKPAV

SEQ ID NO: 49264 - protein, 979 aa, synthetic construct
  REGION 1..979: note = engineered CasX variant
QEIKRINKIRRRLVKDSNTKKAGKTGPMKTLLVRVMTPDLRERLENLRKKPENIPQPISNTSRANLNKLLTDYTEMKKAILHVYWEEFQKDPVGLMSRVAQPASKKIDQNKLKPEMDEKGNLTTAGFACSQCGQPLFVYKLEQVSEKGKAYTNYFGRCNVAEHEKLILLAQLKPEKDSDEAVTYSLGKFGQRALDFYSIHVTKESTHPVKPLAQIAGNRYASGPVGKALRDACMGTIASFLSKYQDIIIEHQKVVKGNQKRLESLRELAGKENLEYPSVTLPPQPHTKEGVDAYNEVIARVRMWVNLNLWQKLKLSRDDAKPLLRLKGFPSFPLVERQANEVDWWDMVCNVKKLINEKKEDGKVFWQNLAGYKRQEALRPYLSSEEDRKKGKKFARYQLGDLLLHLEKKHGEDWGKVYDEAWERIDKKVEGLSKHIKLEEERRSEDAQSKAALTDWLRAKASFVIEGLKEADKDEFCRCELKLQKWYGDLRGKPFAIEAENSILDISGFSKQYNCAFIWQKDGVKKLNLYLIINYFKGGKLRFKKIKPEAFEANRFYTVINKKSGEIVPMEVNFNFDDPNLIILPLAFGKRQGREFIWNDLLSLETGSLKLANGRVIEKTLYNRRTRQDEPALFVALTFERREVLDSSNIKPMNLIGVDRGENIPAVIALTDPEGCPLSRFKDSLGNPTHILRIRESYKEKQRTIQAKKEVEQRRAGGYSRKYASKAKNLADDMVRNTARDLLYYAVTQDAMLIFENLSRGFGRQGKRTFMAERQYTRMEDWLTAKLAYEGLPSKTYLSKTLAQYTSKTCSNCGFTITSADYDRVLEKLKKTATGWMTTINGKELKVEGQITYYNRYKRQNVVKDLSVELDRLSEESVNNDISSWTKGRSGNEALSLLKKRFSHRPVQEKFVCLNCGFETHADEQAALNIARSWLFLRSQEYKKYQTNKTTGNTDKRAFVETWQSFYRKKLKEVWKPAV

SEQ ID NO: 49265 - protein, 978 aa, synthetic construct
  REGION 1..978: note = engineered CasX variant
QEIKRINKIRRRLVKDSNTKKAGKTGPMKTLLVRVMTPDLRERLENLRKKPENIPQPISNTSRANLNKLLTDYTEMKKAILHVYWEEFQKDPVGLMSRVAQPASKKIDQNKLKPEMDEKGNLTTAGFACSQCGQPLFVYKLEQVSEKGKAYTNYFGRCNVAEHEKLILLAQLKPEKDSDEAVTYSLGKFGQRALDFYSIHVTKESTHPVKPLAQIAGNRYASGPVGKALRDACMGTIASFLSKYQDIIIEHQKVVKGNQKRLESLRELAGKENLEYPSVTLPPQPHTKEGVDAYNEVIARVRMWVNLNLWQKLKLSRDDAKPLLRLKGFPSFPLVERQANEVDWWDMVCNVKKLINEKKEDGKVFWQNLAGYKRQEALRPYLSSEEDRQKGKKFARYQLGDLLLHLEKKHGEDWGKVYDEAWERIDKKVEGLSKHIKLEEERRSEDAQSKAALTDWLRAKASFVIEGLKEADKDEFCRCELKLQKWYGDLRGKPFAIEAENSILDISGFSKQYNCAFIWQKDGVKKLNLYLIINYFKGGKLRFKKIKPEAFEANRFYTVINKKSGEIVPMEVNFNFDDPNLIILPLAFGKRQGREFIWNDLLSLETGSLKLANGRVIEKTLYNRRTRQDEPALFVALTFERREVLDSSNIKPMNLIGVDRGENIPAVIALTDPEGCPLSRFKDSLGNPTHILRIRESYKEKQRTIQAKKEVEQRRAGGYSRKYASKAKNLADDMVRNTARDLLYYAVTQDAMLIFENLSRGFGRQGKRTFMAERQYTRMEDWLTAKLAYEGLPSKTYLSKTLAQYTSKTCSNCGFTITSADYDRVLEKLKKTATGWMTTINGKELKVEGQITYYNRYKRQNVVKDLSVELDRLSEESVNNDISSWTKGRSGEALSLLKKRFSHRPVQEKFVCLNCGFETHADEQAALNIARSWLFLRSQEYKKYQTNKTTGNTDKRAFVETWQSFYRKKLKEVWKPAV

SEQ ID NO: 49266 - protein, 978 aa, synthetic construct
  REGION 1..978: note = engineered CasX variant
QEIKRINKIRRRLVKDSNTKKAGKTGPMKTLLVRVMTPDLRERLENLRKKPENIPQPISNTSRANLNKLLTDYTEMKKAILHVYWEEFQKDPVGLMSRVAQPASKKIDQNKLKPEMDEKGNLTTAGFACSQCGQPLFVYKLEQVSEKGKAYTNYFGRCNVAEHEKLILLAQLKPEKDSDEAVTYSLGKFGQRALDFYSIHVTKESTHPVKPLAQIAGNRYASGPVGKALRDACMGTIASFLSKYQDIIIEHQKVVKGNQKRLESLRELAGKENLEYPSVTLPPQPHTKEGVDAYNEVIARVRMWVNLNLWQKLKLSRDDAKPLLRLKGFPSFPLVERQANEVDWWDMVCNVKKLINEKKEDGKVFWQNLAGYKRQEALRPYLSSEEDRKKGKKFARYQLGDLLLHLEKKHGEDWGKVYDEAWERIDKKVEGLSKHIKLEEERRSEDAQSKAALTDWLRAKASFVIEGLKEADKDEFCRCELKLQKWYGDLRGKPFAIEAENSILDISGFSKQYNCAFIWQKDGVKKLNLYLIINYFKGGKLRFKKIKPEAFEANRFYTVINKKSGEIVPMEVNFNFDDPNLIILPLAFGKRQGREFIWNDLLSLETGSLKLANGRVIEKTLYNRRTRQDEPALFVALTFERREVLDSSNIKPMNLIGVDRGENIPAVIALTDPEGCPLSRFKDSLGNPTHILRIRESYKEKQRTIQAKKEVEQRRAGGYSRKYASKAKNLADDMVRNTARDLLYYAVTQDAMLIFENLSRGFGRQGKRTFMAERQYTRMEDWLTAKLAYEGLPSQTYLSKTLAQYTSKTCSNCGFTITSADYDRVLEKLKKTATGWMTTINGKELKVEGQITYYNRYKRQNVVKDLSVELDRLSEESVNNDISSWTKGRSGEALSLLKKRFSHRPVQEKFVCLNCGFETHADEQAALNIARSWLFLRSQEYKKYQTNKTTGNTDKRAFVETWQSFYRKKLKEVWKPAV

SEQ ID NO: 49267 - protein, 978 aa, synthetic construct
  REGION 1..978: note = engineered CasX variant
QEIKRINKIRRRLVKDSNTKKAGKTGPMKTLLVRVMTPDLRERLENLRKKPENIPQPISNTSRANLNKLLTDYTEMKKAILHVYWEEFQKDPVGLMSRVAQPASKKIDQNKLKPEMDEKGNLTTAGFACSQCGQPLFVYKLEQVSEKGKAYTNYFGRCNVAEHEKLILLAQLKPEKDSDEAVTYSLGKFGQRALDFYSIHVTKESTHPVKPLAQIAGNRYASGPVGKALRDACMGTIASFLSKYQDIIIEHQKVVKGNQKRLESLRELAGKENLEYPSVTLPPQPHTKEGVDAYNEVIARVRMWVNLNLWQKLKLSRDDAKPLLRLKGFPSFPLVERQANEVDWWDMVCNVKKLINEKKEDGKVFWQNLAGYKRQEALRPYLSSEEDRKKGKKFARYQLGDLLLHLEKKHGEDWGKVYDEAWERIDKKVEGLSKHIKLEEERRSEDAQSKAALTDWLRAKASFVIEGLKEADKDEFCRCELKLQKWYGDLRGKPFAIEAENSILDISGFSKQYNCAFIWQKDGVKKLNLYLIINYFKGGKLRFKKIKPEAFEANRFYTVINKKSGEIVPMEVNFNFDDPNLIILPLAFGKRQGREFIWNDLLSLETGSLKLANGRVIEKTLYNRRTRQDEPALFVALTFERREVLDSSNIKPMNLIGVDRGENIPAVIALTDPEGCPLSRFKDSLGNPTHILRIRESYKEKQRTIQAKKEVEQRRAGGYSRKYASKAKNLADDMVRNTARDLLYYAVTQDAMLIFENLSRGFGRQGKRTFMAERQYTRMEDWLTAKLAYNGLPSKTYLSKTLAQYTSKTCSNCGFTITSADYDRVLEKLKKTATGWMTTINGKELKVEGQITYYNRYKRQNVVKDLSVELDRLSEESVNNDISSWTKGRSGEALSLLKKRFSHRPVQEKFVCLNCGFETHADEQAALNIARSWLFLRSQEYKKYQTNKTTGNTDKRAFVETWQSFYRKKLKEVWKPAV

SEQ ID NO: 49268 - protein, 978 aa, synthetic construct
  REGION 1..978: note = engineered CasX variant
QEIKRINKIRRRLVKDSNTKKAGKTGPMKTLLVRVMTPDLRERLENLRKKPENIPQPISNTSRANLNKLLTDYTEMKKAILHVYWEEFQKDPVGLMSRVAQPASKKIDQNKLKPEMDEKGNLTTAGFACSQCGQPLFVYKLEQVSEKGKAYTNYFGRCNVAEHEKLIQLAQLKPEKDSDEAVTYSLGKFGQRALDFYSIHVTKESTHPVKPLAQIAGNRYASGPVGKALRDACMGTIASFLSKYQDIIIEHQKVVKGNQKRLESLRELAGKENLEYPSVTLPPQPHTKEGVDAYNEVIARVRMWVNLNLWQKLKLSRDDAKPLLRLKGFPSFPLVERQANEVDWWDMVCNVKKLINEKKEDGKVFWQNLAGYKRQEALRPYLSSEEDRKKGKKFARYQLGDLLLHLEKKHGEDWGKVYDEAWERIDKKVEGLSKHIKLEEERRSEDAQSKAALTDWLRAKASFVIEGLKEADKDEFCRCELKLQKWYGDLRGKPFAIEAENSILDISGFSKQYNCAFIWQKDGVKKLNLYLIINYFKGGKLRFKKIKPEAFEANRFYTVINKKSGEIVPMEVNFNFDDPNLIILPLAFGKRQGREFIWNDLLSLETGSLKLANGRVIEKTLYNRRTRQDEPALFVALTFERREVLDSSNIKPMNLIGVDRGENIPAVIALTDPEGCPLSRFKDSLGNPTHILRIRESYKEKQRTIQAKKEVEQRRAGGYSRKYASKAKNLADDMVRNTARDLLYYAVTQDAMLIFENLSRGFGRQGKRTFMAERQYTRMEDWLTAKLAYEGLPSKTYLSKTLAQYTSKTCSNCGFTITSADYDRVLEKLKKTATGWMTTINGKELKVEGQITYYNRYKRQNVVKDLSVELDRLSEESVNNDISSWTKGRSGEALSLLKKRFSHRPVQEKFVCLNCGFETHADEQAALNIARSWLFLRSQEYKKYQTNKTTGNTDKRAFVETWQSFYRKKLKEVWKPAV

SEQ ID NO: 49269 - protein, 978 aa, synthetic construct
  REGION 1..978: note = engineered CasX variant
QEIKRINKIRRRLVKDSNTKKAGKTGPMKTLLVRVMTPDLRERLENLRKKPENIPQPISNTSRANLNKLLTDYTEMKKAILHVYWEEFQKDPVGLMSRVAQPASKKIDQNKLKPEMDEKGNLTTAGFACSQCGQPLFVYKLEQVSEKGKAYTNYFGRCNVAEHEKLILLAQLKPEKDSDEAVTYSLGKFGQRALDFYSIHVTKESTHPVKPLAQIAGNRYASGPVGKALRDACMGTIASFLSKYQDIIIEHQKVVKGNQKRLESLRELAGKENLEYPSVTLPPQPHTKEGVDAYNEVIARVRMWVNLNLWQKLKLSRDDAKPLLRLKGFPSFPLVERQANEVDWWDMVCNVKKLINEKKEDGKVFWQNLAIYKRQEALRPYLSSEEDRKKGKKFARYQLGDLLLHLEKKHGEDWGKVYDEAWERIDKKVEGLSKHIKLEEERRSEDAQSKAALTDWLRAKASFVIEGLKEADKDEFCRCELKLQKWYGDLRGKPFAIEAENSILDISGFSKQYNCAFIWQKDGVKKLNLYLIINYFKGGKLRFKKIKPEAFEANRFYTVINKKSGEIVPMEVNFNFDDPNLIILPLAFGKRQGREFIWNDLLSLETGSLKLANGRVIEKTLYNRRTRQDEPALFVALTFERREVLDSSNIKPMNLIGVDRGENIPAVIALTDPEGCPLSRFKDSLGNPTHILRIRESYKEKQRTIQAKKEVEQRRAGGYSRKYASKAKNLADDMVRNTARDLLYYAVTQDAMLIFENLSRGFGRQGKRTFMAERQYTRMEDWLTAKLAYEGLPSKTYLSKTLAQYTSKTCSNCGFTITSADYDRVLEKLKKTATGWMTTINGKELKVEGQITYYNRYKRQNVVKDLSVELDRLSEESVNNDISSWTKGRSGEALSLLKKRFSHRPVQEKFVCLNCGFETHADEQAALNIARSWLFLRSQEYKKYQTNKTTGNTDKRAFVETWQSFYRKKLKEVWKPAV

SEQ ID NO: 49270 - protein, 978 aa, synthetic construct
  REGION 1..978: note = engineered CasX variant
QEIKRINKIRRRLVKDSNTKKAGKTGPMKTLLVRVMTPDLRERLENLRKKPENIPQPISNTSRANLNKLLTDYTEMKKAILHVYWEEFQKDPVGLMSRVAQPASKKIDQNKLKPEMDEKGNLTTAGFACSQCGQPLFVYKLEQVSEKGKAYTNYFGRCNVAEHEKLILLAQLKPEKDSDEAVTYSLGKFGQRALDFYSIHVTKESTHPVKPLAQIAGNRYASGPVGKALRDACMGTIASFLSKYQDIIIEHQKVVKGNQKRLESLRELAGKENLEYPSVTLPPQPHTKEGVDAYNEVIARVRMWVNLNLWQKLKLSRDDAKPLLRLKGFPSFPLVERQANEVDWWDMVCNVKKLINEKKEDGKVFWQNLAGYKRQEALRPYLSSEEDREKGKKFARYQLGDLLLHLEKKHGEDWGKVYDEAWERIDKKVEGLSKHIKLEEERRSEDAQSKAALTDWLRAKASFVIEGLKEADKDEFCRCELKLQKWYGDLRGKPFAIEAENSILDISGFSKQYNCAFIWQKDGVKKLNLYLIINYFKGGKLRFKKIKPEAFEANRFYTVINKKSGEIVPMEVNFNFDDPNLIILPLAFGKRQGREFIWNDLLSLETGSLKLANGRVIEKTLYNRRTRQDEPALFVALTFERREVLDSSNIKPMNLIGVDRGENIPAVIALTDPEGCPLSRFKDSLGNPTHILRIRESYKEKQRTIQAKKEVEQRRAGGYSRKYASKAKNLADDMVRNTARDLLYYAVTQDAMLIFENLSRGFGRQGKRTFMAERQYTRMEDWLTAKLAYEGLPSKTYLSKTLAQYTSKTCSNCGFTITSADYDRVLEKLKKTATGWMTTINGKELKVEGQITYYNRYKRQNVVKDLSVELDRLSEESVNNDISSWTKGRSGEALSLLKKRFSHRPVQEKFVCLNCGFETHADEQAALNIARSWLFLRSQEYKKYQTNKTTGNTDKRAFVETWQSFYRKKLKEVWKPAV

SEQ ID NO: 49271 - protein, 978 aa, synthetic construct
  REGION 1..978: note = engineered CasX variant
QEIKRINKIRRRLVKDSNTKKAGKTGPMKTLLVRVMTPDLRERLENLRKKPENIPQPISNTSRANLNKLLTDYTEMKKAILHVYWEEFQKDPVGLMSRVAQPASKKIDQNKLKPEMDEKGNLTTAGFACSQCGQPLFVYKLEQVSEKGKAYTNYFGRCNVAEHEKLILLAQLKPEKDSDEAVTYSLGKFGQRALDFYSIHVTKESTHPVKPLAQIAGNRYASGPVGKALRDACMGTIASFLSKYQDIIIEHQKVVKGNQKRLESLRELAGKENLEYPSVTLPPQPHTKEGVDAYNEVIARVRMWVNLNLWQKLKLSRDDAKPLLRLKGFPSFPLVERQANEVDWWDMVCNVKKLINEKKEDGKVFWQNLAGYKRQEALRPYLSSEEDRKKGKKFARYQLGDLLLHLEKKHGEDWGKVYDEAWERIDKKVEGLSKHIKLEEERRSEDAQSKAALTDWLRAKASFVIEGLKEADKDEFCRCELKLQKWYGDLRGKPFAIEAENSILDISGFSKQYNCAFIWQKDGVKKLNLYLIINYFKGGKLRFKKIKPEAFEANRFYTVINKKSGEIVIMEVNFNFDDPNLIILPLAFGKRQGREFIWNDLLSLETGSLKLANGRVIEKTLYNRRTRQDEPALFVALTFERREVLDSSNIKPMNLIGVDRGENIPAVIALTDPEGCPLSRFKDSLGNPTHILRIRESYKEKQRTIQAKKEVEQRRAGGYSRKYASKAKNLADDMVRNTARDLLYYAVTQDAMLIFENLSRGFGRQGKRTFMAERQYTRMEDWLTAKLAYEGLPSKTYLSKTLAQYTSKTCSNCGFTITSADYDRVLEKLKKTATGWMTTINGKELKVEGQITYYNRYKRQNVVKDLSVELDRLSEESVNNDISSWTKGRSGEALSLLKKRFSHRPVQEKFVCLNCGFETHADEQAALNIARSWLFLRSQEYKKYQTNKTTGNTDKRAFVETWQSFYRKKLKEVWKPAV

SEQ ID NO: 49272 - protein, 978 aa, synthetic construct
  REGION 1..978: note = engineered CasX variant
QEIKRINKIRRRLVKDSNTKKAGKTGPMKTLLVRVMTPDLRERLENLRKKPENIPQPISNTSRANLNKLLTDYTEMKKAILHVYWEEFQKDPVGLMSRVAQPASKKIDQNKLKPEMDEKGNLTTAGFACSQCGQPLFVYKLEQVSEKGKAYTNYFGRCNVAEHEKLILLAQLKPEKDSDEAVTYSLGKFGQRALDFYSIHVTKESTHPVKPLAQIAGNRYASGPVGKALRGACMGTIASFLSKYQDIIIEHQKVVKGNQKRLESLRELAGKENLEYPSVTLPPQPHTKEGVDAYNEVIARVRMWVNLNLWQKLKLSRDDAKPLLRLKGFPSFPLVERQANEVDWWDMVCNVKKLINEKKEDGKVFWQNLAGYKRQEALRPYLSSEEDRKKGKKFARYQLGDLLLHLEKKHGEDWGKVYDEAWERIDKKVEGLSKHIKLEEERRSEDAQSKAALTDWLRAKASFVIEGLKEADKDEFCRCELKLQKWYGDLRGKPFAIEAENSILDISGFSKQYNCAFIWQKDGVKKLNLYLIINYFKGGKLRFKKIKPEAFEANRFYTVINKKSGEIVPMEVNFNFDDPNLIILPLAFGKRQGREFIWNDLLSLETGSLKLANGRVIEKTLYNRRTRQDEPALFVALTFERREVLDSSNIKPMNLIGVDRGENIPAVIALTDPEGCPLSRFKDSLGNPTHILRIGESYKEKQRTIQAKKEVEQRRAGGYSRKYASKAKNLADDMVRNTARDLLYYAVTQDAMLIFENLSRGFGRQGKRTFSAERQYTRMEDWLTAKLAYEGLPSKTYLSKTLAQYTSKTCSNCGFTITSADYDRVLEKLKKTATGWMTTINGKELKVEGQITYYNRYKRQNVVKDLSVELDRLSEESVNNDISSWTKGRSGEALSLLKKRFSHRPVQEKFVCLNCGFETHADEQAALNIARSWLFLRSQEYKKYQTNKTTGNTDKRAFVETWQSFYRKKLKEVWKPAV

SEQ ID NO: 49273 - protein, 978 aa, synthetic construct
  REGION 1..978: note = engineered CasX variant
QEIKRINKIRRRLVKDSNTKKAGKTGPMKTLLVRVMTPDLRERLENLRKKPENIPQPISNTSRANLNKLLTDYTEMKKAILHVYWEEFQKDPVGLMSRVAQPASKKIDQNKLKPEMDEKGNLTTAGFACSQCGQPLFVYKLEQVSEKGKAYTNYFGRCNVAEHEKLILLAQLKPEKDSDEAVTYSLGKFGQRALDFYSIHVTKESTHPVKPLAQIAGNRYASGPVGKALRDACMGTIASFLSKYQDIIIEHQKVVKGNQKRLESLRELAGKENLEYPSVTLPPQPHTKEGVDAYNEVIARVRMWVNLNLWQKLKLSRDDAKPLLRLKNFPSFPLVERQANEVDWWDMVCNVKKLINEKKEDGKVFWQNLAGYKRQEALRPYLSSEEDRKKGKKFARYQLGDLLLHLEKKHGEDWGKVYDEAWERIDKKVEGLSKHIKLEEERRSEDAQSKAALTDWLRAKASFVIEGLKEADKDEFCRCELKLQKWYGDLRGKPFAIEAENSILDISGFSKQYNCAFIWQKDGVKKLNLYLIINYFKGGKLRFKKIKPEAFEANRFYTVINKKSGEIVPMEVNFNFDDPNLIILPLAFGKRQGREFIWNDLLSLETGSLKLANGRVIEKTLYNRRTRQDEPALFVALTFERREVLDSSNIKPMNLIGVDRGENIPAVIALTDPEGCPLSRFKDSLGNPTHILRIGESYKEKQRTIQAKKEVEQRRAGGYSRKYASKAKNLADDMVRNTARDLLYYAVTQDAMLIFENLSRGFGRQGKRTFSAERQYTRMEDWLTAKLAYEGLPSKTYLSKTLAQYTSKTCSNCGFTITSADYDRVLEKLKKTATGWMTTINGKELKVEGQITYYNRYKRQNVVKDLSVELDRLSEESVNNDISSWTKGRSGEALSLLKKRFSHRPVQEKFVCLNCGFETHADEQAALNIARSWLFLRSQEYKKYQTNKTTGNTDKRAFVETWQSFYRKKLKEVWKPAV

SEQ ID NO: 49274 - protein, 978 aa, synthetic construct
  REGION 1..978: note = engineered CasX variant
QEIKRINKIRRRLVKDSNTKKAGKTGPMKTLLVRVMTPDLRERLENLRKKPENIPQPISNTSRANLNKLLTDYTEMKKAILHVYWEEFQKDPVGLMSRVAQPASKKIDQNKLKPEMDEKGNLTTAGFACSQCGQPLFVYKLEQVSEKGKAYTNYFGRCNVAEHEKLILLAQLKPEKDSDEAVTYSLGKFGQRALDFYSIHVTKESTHPVKPLAQIAGNRYASGPVGKALRDACMGTIASFLSKYQDIIIEHQKVVKGNQKRLESLRELAGKENLEYPSVTLPPQPHTKEGVDAYNEVIARVRMWVNLNLWQKLKLSRDDAKPLLRLKGFPSFPLVERQANEVDWWDMVCNVKKLINEKKEDGKVFWQNLAGYKRQEALRPYLSSEEDRKKGKKFARYQLGDLLNHLEKKHGEDWGKVYDEAWERIDKKVEGLSKHIKLEEERRSEDAQSKAALTDWLRAKASFVIEGLKEADKDEFCRCELKLQKWYGDLRGKPFAIEAENSILDISGFSKQYNCAFIWQKDGVKKLNLYLIINYFKGGKLRFKKIKPEAFEANRFYTVINKKSGEIVPMEVNFNFDDPNLIILPLAFGKRQGREFIWNDLLSLETGSLKLANGRVIEKTLYNRRTRQDEPALFVALTFERREVLDSSNIKPMNLIGVDRGENIPAVIALTDPEGCPLSRFKDSLGNPTHILRIGESYKEKQRTIQAKKEVEQRRAGGYSRKYASKAKNLADDMVRNTARDLLYYAVTQDAMLIFENLSRGFGRQGKRTFSAERQYTRMEDWLTAKLAYEGLPSKTYLSKTLAQYTSKTCSNCGFTITSADYDRVLEKLKKTATGWMTTINGKELKVEGQITYYNRYKRQNVVKDLSVELDRLSEESVNNDISSWTKGRSGEALSLLKKRFSHRPVQEKFVCLNCGFETHADEQAALNIARSWLFLRSQEYKKYQTNKTTGNTDKRAFVETWQSFYRKKLKEVWKPAV

SEQ ID NO: 49275 - protein, 978 aa, synthetic construct
  REGION 1..978: note = engineered CasX variant
QEIKRINKIRRRLVKDSNTKKAGKTGPMKTLLVRVMTPDLRERLENLRKKPENIPQPISNTSRANLNKLLTDYTEMKKAILHVYWEEFQKDPVGLMSRVAQPASKKIDQNKLKPEMDEKGNLTTAGFACSQCGQPLFVYKLEQVSEKGKAYTNYFGRCNVAEHEKLILLAQLKPEKDSDEAVTYSLGKFGQRALDFYSIHVTKESTHPVKPLAQIAGNRYASGPVGKALRDACMGTIASFLSKYQDIIIEHQKVVKGNQKRLESLRELAGKENLEYPSVTLPPQPHTKEGVDAYNEVIARVRMWVNLNLWQKLKLSRDDAKPLLRLKGFPSFPLVERQANEVDWWDMVCNVKKLINEKKEDGKVFWQNLAGYKRQEALRPYLSSEEDRKKGKKFARYQLGDLLWHLEKKHGEDWGKVYDEAWERIDKKVEGLSKHIKLEEERRSEDAQSKAALTDWLRAKASFVIEGLKEADKDEFCRCELKLQKWYGDLRGKPFAIEAENSILDISGFSKQYNCAFIWQKDGVKKLNLYLIINYFKGGKLRFKKIKPEAFEANRFYTVINKKSGEIVPMEVNFNFDDPNLIILPLAFGKRQGREFIWNDLLSLETGSLKLANGRVIEKTLYNRRTRQDEPALFVALTFERREVLDSSNIKPMNLIGVDRGENIPAVIALTDPEGCPLSRFKDSLGNPTHILRIGESYKEKQRTIQAKKEVEQRRAGGYSRKYASKAKNLADDMVRNTARDLLYYAVTQDAMLIFENLSRGFGRQGKRTFSAERQYTRMEDWLTAKLAYEGLPSKTYLSKTLAQYTSKTCSNCGFTITSADYDRVLEKLKKTATGWMTTINGKELKVEGQITYYNRYKRQNVVKDLSVELDRLSEESVNNDISSWTKGRSGEALSLLKKRFSHRPVQEKFVCLNCGFETHADEQAALNIARSWLFLRSQEYKKYQTNKTTGNTDKRAFVETWQSFYRKKLKEVWKPAV

SEQ ID NO: 49276 - protein, 978 aa, synthetic construct
  REGION 1..978: note = engineered CasX variant
QEIKRINKIRRRLVKDSNTKKAGKTGPMKTLLVRVMTPDLRERLENLRKKPENIPQPISNTSRANLNKLLTDYTEMKKAILHVYWEEFQKDPVGLMSRVAQPASKKIDQNKLKPEMDEKGNLTTAGFACSQCGQPLFVYKLEQVSEKGKAYTNYFGRCNVAEHEKLILLAQLKPEKDSDEAVTYSLGKFGQRALDFYSIHVTKESTHPVKPLAQIAGNRYASGPVGKALRDACMGTIASFLSKYQDIIIEHQKVVKGNQKRLESLRELAGKENLEYPSVTLPPQPHTKEGVDAYNEVIARVRMWVNLNLWQKLKLSRDDAKPLLRLKGFPSFPLVERQANEVDWWDMVCNVKKLINEKKEDGKVFWQNLAGYKRQEALRPYLSSEEDRKKGKKFARYQLGDLLLHLYKKHGEDWGKVYDEAWERIDKKVEGLSKHIKLEEERRSEDAQSKAALTDWLRAKASFVIEGLKEADKDEFCRCELKLQKWYGDLRGKPFAIEAENSILDISGFSKQYNCAFIWQKDGVKKLNLYLIINYFKGGKLRFKKIKPEAFEANRFYTVINKKSGEIVPMEVNFNFDDPNLIILPLAFGKRQGREFIWNDLLSLETGSLKLANGRVIEKTLYNRRTRQDEPALFVALTFERREVLDSSNIKPMNLIGVDRGENIPAVIALTDPEGCPLSRFKDSLGNPTHILRIGESYKEKQRTIQAKKEVEQRRAGGYSRKYASKAKNLADDMVRNTARDLLYYAVTQDAMLIFENLSRGFGRQGKRTFSAERQYTRMEDWLTAKLAYEGLPSKTYLSKTLAQYTSKTCSNCGFTITSADYDRVLEKLKKTATGWMTTINGKELKVEGQITYYNRYKRQNVVKDLSVELDRLSEESVNNDISSWTKGRSGEALSLLKKRFSHRPVQEKFVCLNCGFETHADEQAALNIARSWLFLRSQEYKKYQTNKTTGNTDKRAFVETWQSFYRKKLKEVWKPAV

SEQ ID NO: 49277 - protein, 978 aa, synthetic construct
  REGION 1..978: note = engineered CasX variant
QEIKRINKIRRRLVKDSNTKKAGKTGPMKTLLVRVMTPDLRERLENLRKKPENIPQPISNTSRANLNKLLTDYTEMKKAILHVYWEEFQKDPVGLMSRVAQPASKKIDQNKLKPEMDEKGNLTTAGFACSQCGQPLFVYKLEQVSEKGKAYTNYFGRCNVAEHEKLILLAQLKPEKDSDEAVTYSLGKFGQRALDFYSIHVTKESTHPVKPLAQIAGNRYASGPVGKALRDACMGTIASFLSKYQDIIIEHQKVVKGNQKRLESLRELAGKENLEYPSVTLPPQPHTKEGVDAYNEVIARVRMWVNLNLWQKLKLSRDDAKPLLRLKGFPSFPLVERQANEVDWWDMVCNVKKLINEKKEDGKVFWQNLAGYKRQEALRPYLSSEEDRKKGKKFARYQLGDLLLHLEKKHPEDWGKVYDEAWERIDKKVEGLSKHIKLEEERRSEDAQSKAALTDWLRAKASFVIEGLKEADKDEFCRCELKLQKWYGDLRGKPFAIEAENSILDISGFSKQYNCAFIWQKDGVKKLNLYLIINYFKGGKLRFKKIKPEAFEANRFYTVINKKSGEIVPMEVNFNFDDPNLIILPLAFGKRQGREFIWNDLLSLETGSLKLANGRVIEKTLYNRRTRQDEPALFVALTFERREVLDSSNIKPMNLIGVDRGENIPAVIALTDPEGCPLSRFKDSLGNPTHILRIGESYKEKQRTIQAKKEVEQRRAGGYSRKYASKAKNLADDMVRNTARDLLYYAVTQDAMLIFENLSRGFGRQGKRTFSAERQYTRMEDWLTAKLAYEGLPSKTYLSKTLAQYTSKTCSNCGFTITSADYDRVLEKLKKTATGWMTTINGKELKVEGQITYYNRYKRQNVVKDLSVELDRLSEESVNNDISSWTKGRSGEALSLLKKRFSHRPVQEKFVCLNCGFETHADEQAALNIARSWLFLRSQEYKKYQTNKTTGNTDKRAFVETWQSFYRKKLKEVWKPAV

SEQ ID NO: 49278 - protein, 979 aa, synthetic construct
  REGION 1..979: note = engineered CasX variant
QEIKRINKIRRRLVKDSNTKKAGKTGPMKTLLVRVMTPDLRERLENLRKKPENIPQPISNTSRANLNKLLTDYTEMKKAILHVYWEEFQKDPVGLMSRVAQPASKKIDQNKLKPEMDEKGNLTTAGFACSQCGQPLFVYKLEQVSEKGKAYTNYFGRCNVAEHEKLILLAQLKPEKDSDEAVTYSLGKFGQRALDFYSIHVTKESTHPVKPLAQIAGNRYASGPVGKALRDACMGTIASFLSKYQDIIIEHQKVVKGNQKRLESLRELAGKENLEYPSVTLPPQPHTKEGVDAYNEVIARVRMWVNLNLWQKLKLSRDDAKPLLRLKGFPSFPLVERQANEVDWWDMVCNVKKLINEKKEDGKVFWQNLAGYKRQEALRPYLSSEEDRKKGKKFARYQLGDLLLHLEKKHGERDWGKVYDEAWERIDKKVEGLSKHIKLEEERRSEDAQSKAALTDWLRAKASFVIEGLKEADKDEFCRCELKLQKWYGDLRGKPFAIEAENSILDISGFSKQYNCAFIWQKDGVKKLNLYLIINYFKGGKLRFKKIKPEAFEANRFYTVINKKSGEIVPMEVNFNFDDPNLIILPLAFGKRQGREFIWNDLLSLETGSLKLANGRVIEKTLYNRRTRQDEPALFVALTFERREVLDSSNIKPMNLIGVDRGENIPAVIALTDPEGCPLSRFKDSLGNPTHILRIGESYKEKQRTIQAKKEVEQRRAGGYSRKYASKAKNLADDMVRNTARDLLYYAVTQDAMLIFENLSRGFGRQGKRTFSAERQYTRMEDWLTAKLAYEGLPSKTYLSKTLAQYTSKTCSNCGFTITSADYDRVLEKLKKTATGWMTTINGKELKVEGQITYYNRYKRQNVVKDLSVELDRLSEESVNNDISSWTKGRSGEALSLLKKRFSHRPVQEKFVCLNCGFETHADEQAALNIARSWLFLRSQEYKKYQTNKTTGNTDKRAFVETWQSFYRKKLKEVWKPAV

SEQ ID NO: 49279 - protein, 979 aa, synthetic construct
  REGION 1..979: note = engineered CasX variant
QEIKRINKIRRRLVKDSNTKKAGKTGPMKTLLVRVMTPDLRERLENLRKKPENIPQPISNTSRANLNKLLTDYTEMKKAILHVYWEEFQKDPVGLMSRVAQPASKKIDQNKLKPEMDEKGNLTTAGFACSQCGQPLFVYKLEQVSEKGKAYTNYFGRCNVAEHEKLILLAQLKPEKDSDEAVTYSLGKFGQRALDFYSIHVTKESTHPVKPLAQIAGNRYASGPVGKALRDACMGTIASFLSKYQDIIIEHQKVVKGNQKRLESLRELAGKENLEYPSVTLPPQPHTKEGVDAYNEVIARVRMWVNLNLWQKLKLSRDDAKPLLRLKGFPSFPLVERQANEVDWWDMVCNVKKLINEKKEDGKVFWQNLAGYKRQEALRPYLSSEEDRKKGKKFARYQLGDLLLHLEKKHGEYDWGKVYDEAWERIDKKVEGLSKHIKLEEERRSEDAQSKAALTDWLRAKASFVIEGLKEADKDEFCRCELKLQKWYGDLRGKPFAIEAENSILDISGFSKQYNCAFIWQKDGVKKLNLYLIINYFKGGKLRFKKIKPEAFEANRFYTVINKKSGEIVPMEVNFNFDDPNLIILPLAFGKRQGREFIWNDLLSLETGSLKLANGRVIEKTLYNRRTRQDEPALFVALTFERREVLDSSNIKPMNLIGVDRGENIPAVIALTDPEGCPLSRFKDSLGNPTHILRIGESYKEKQRTIQAKKEVEQRRAGGYSRKYASKAKNLADDMVRNTARDLLYYAVTQDAMLIFENLSRGFGRQGKRTFSAERQYTRMEDWLTAKLAYEGLPSKTYLSKTLAQYTSKTCSNCGFTITSADYDRVLEKLKKTATGWMTTINGKELKVEGQITYYNRYKRQNVVKDLSVELDRLSEESVNNDISSWTKGRSGEALSLLKKRFSHRPVQEKFVCLNCGFETHADEQAALNIARSWLFLRSQEYKKYQTNKTTGNTDKRAFVETWQSFYRKKLKEVWKPAV

SEQ ID NO: 49280 - protein, 978 aa, synthetic construct
  REGION 1..978: note = engineered CasX variant
QEIKRINKIRRRLVKDSNTKKAGKTGPMKTLLVRVMTPDLRERLENLRKKPENIPQPISNTSRANLNKLLTDYTEMKKAILHVYWEEFQKDPVGLMSRVAQPASKKIDQNKLKPEMDEKGNLTTAGFACSQCGQPLFVYKLEQVSEKGKAYTNYFGRCNVAEHEKLILLAQLKPEKDSDEAVTYSLGKFGQRALDFYSIHVTKESTHPVKPLAQIAGNRYASGPVGKALRDACMGTIASFLSKYQDIIIEHQKVVKGNQKRLESLRELAGKENLEYPSVTLPPQPHTKEGVDAYNEVIARVRMWVNLNLWQKLKLSRDDAKPLLRLKGFPSFPLVERQANEVDWWDMVCNVKKLINEKKEDGKVFWQNLAGYKRQEALRPYLSSEEDRKKGKKFARYQLGDLLLHLEKKHGEDWGDVYDEAWERIDKKVEGLSKHIKLEEERRSEDAQSKAALTDWLRAKASFVIEGLKEADKDEFCRCELKLQKWYGDLRGKPFAIEAENSILDISGFSKQYNCAFIWQKDGVKKLNLYLIINYFKGGKLRFKKIKPEAFEANRFYTVINKKSGEIVPMEVNFNFDDPNLIILPLAFGKRQGREFIWNDLLSLETGSLKLANGRVIEKTLYNRRTRQDEPALFVALTFERREVLDSSNIKPMNLIGVDRGENIPAVIALTDPEGCPLSRFKDSLGNPTHILRIGESYKEKQRTIQAKKEVEQRRAGGYSRKYASKAKNLADDMVRNTARDLLYYAVTQDAMLIFENLSRGFGRQGKRTFSAERQYTRMEDWLTAKLAYEGLPSKTYLSKTLAQYTSKTCSNCGFTITSADYDRVLEKLKKTATGWMTTINGKELKVEGQITYYNRYKRQNVVKDLSVELDRLSEESVNNDISSWTKGRSGEALSLLKKRFSHRPVQEKFVCLNCGFETHADEQAALNIARSWLFLRSQEYKKYQTNKTTGNTDKRAFVETWQSFYRKKLKEVWKPAV

SEQ ID NO: 49281 - protein, 978 aa, synthetic construct
  REGION 1..978: note = engineered CasX variant
QEIKRINKIRRRLVKDSNTKKAGKTGPMKTLLVRVMTPDLRERLENLRKKPENIPQPISNTSRANLNKLLTDYTEMKKAILHVYWEEFQKDPVGLMSRVAQPASKKIDQNKLKPEMDEKGNLTTAGFACSQCGQPLFVYKLEQVSEKGKAYTNYFGRCNVAEHEKLILLAQLKPEKDSDEAVTYSLGKFGQRALDFYSIHVTKESTHPVKPLAQIAGNRYASGPVGKALRDACMGTIASFLSKYQDIIIEHQKVVKGNQKRLESLRELAGKENLEYPSVTLPPQPHTKEGVDAYNEVIARVRMWVNLNLWQKLKLSRDDAKPLLRLKGFPSFPLVERQANEVDWWDMVCNVKKLINEKKEDGKVFWQNLAGYKRQEALRPYLSSEEDRKKGKKFARYQLGDLLLHLEKKHGEDWGKVYGEAWERIDKKVEGLSKHIKLEEERRSEDAQSKAALTDWLRAKASFVIEGLKEADKDEFCRCELKLQKWYGDLRGKPFAIEAENSILDISGFSKQYNCAFIWQKDGVKKLNLYLIINYFKGGKLRFKKIKPEAFEANRFYTVINKKSGEIVPMEVNFNFDDPNLIILPLAFGKRQGREFIWNDLLSLETGSLKLANGRVIEKTLYNRRTRQDEPALFVALTFERREVLDSSNIKPMNLIGVDRGENIPAVIALTDPEGCPLSRFKDSLGNPTHILRIGESYKEKQRTIQAKKEVEQRRAGGYSRKYASKAKNLADDMVRNTARDLLYYAVTQDAMLIFENLSRGFGRQGKRTFSAERQYTRMEDWLTAKLAYEGLPSKTYLSKTLAQYTSKTCSNCGFTITSADYDRVLEKLKKTATGWMTTINGKELKVEGQITYYNRYKRQNVVKDLSVELDRLSEESVNNDISSWTKGRSGEALSLLKKRFSHRPVQEKFVCLNCGFETHADEQAALNIARSWLFLRSQEYKKYQTNKTTGNTDKRAFVETWQSFYRKKLKEVWKPAV

SEQ ID NO: 49282 - protein, 978 aa, synthetic construct
  REGION 1..978: note = engineered CasX variant
QEIKRINKIRRRLVKDSNTKKAGKTGPMKTLLVRVMTPDLRERLENLRKKPENIPQPISNTSRANLNKLLTDYTEMKKAILHVYWEEFQKDPVGLMSRVAQPASKKIDQNKLKPEMDEKGNLTTAGFACSQCGQPLFVYKLEQVSEKGKAYTNYFGRCNVAEHEKLILLAQLKPEKDSDEAVTYSLGKFGQRALDFYSIHVTKESTHPVKPLAQIAGNRYASGPVGKALRDACMGTIASFLSKYQDIIIEHQKVVKGNQKRLESLRELAGKENLEYPSVTLPPQPHTKEGVDAYNEVIARVRMWVNLNLWQKLKLSRDDAKPLLRLKGFPSFPLVERQANEVDWWDMVCNVKKLINEKKEDGKVFWQNLAGYKRQEALRPYLSSEEDRKKGKKFARYQLGDLLLHLEKKHGEDWGKVYDEAWERIDKKVEGLSKHIKLEEERRSEDAQSKAALTDWLRAKASFVIEGKKEADKDEFCRCELKLQKWYGDLRGKPFAIEAENSILDISGFSKQYNCAFIWQKDGVKKLNLYLIINYFKGGKLRFKKIKPEAFEANRFYTVINKKSGEIVPMEVNFNFDDPNLIILPLAFGKRQGREFIWNDLLSLETGSLKLANGRVIEKTLYNRRTRQDEPALFVALTFERREVLDSSNIKPMNLIGVDRGENIPAVIALTDPEGCPLSRFKDSLGNPTHILRIGESYKEKQRTIQAKKEVEQRRAGGYSRKYASKAKNLADDMVRNTARDLLYYAVTQDAMLIFENLSRGFGRQGKRTFSAERQYTRMEDWLTAKLAYEGLPSKTYLSKTLAQYTSKTCSNCGFTITSADYDRVLEKLKKTATGWMTTINGKELKVEGQITYYNRYKRQNVVKDLSVELDRLSEESVNNDISSWTKGRSGEALSLLKKRFSHRPVQEKFVCLNCGFETHADEQAALNIARSWLFLRSQEYKKYQTNKTTGNTDKRAFVETWQSFYRKKLKEVWKPAV

SEQ ID NO: 49283 - protein, 978 aa, synthetic construct
  REGION 1..978: note = engineered CasX variant
QEIKRINKIRRRLVKDSNTKKAGKTGPMKTLLVRVMTPDLRERLENLRKKPENIPQPISNTSRANLNKLLTDYTEMKKAILHVYWEEFQKDPVGLMSRVAQPASKKIDQNKLKPEMDEKGNLTTAGFACSQCGQPLFVYKLEQVSEKGKAYTNYFGRCNVAEHEKLILLAQLKPEKDSDEAVTYSLGKFGQRALDFYSIHVTKESTHPVKPLAQIAGNRYASGPVGKALRDACMGTIASFLSKYQDIIIEHQKVVKGNQKRLESLRELAGKENLEYPSVTLPPQPHTKEGVDAYNEVIARVRMWVNLNLWQKLKLSRDDAKPLLRLKGFPSFPLVERQANEVDWWDMVCNVKKLINEKKEDGKVFWQNLAGYKRQEALRPYLSSEEDRKKGKKFARYQLGDLLLHLEKKHGEDWGKVYDEAWERIDKKVEGLSKHIKLEEERRSEDAQSKAALTDWLRAKASFVIEGSKEADKDEFCRCELKLQKWYGDLRGKPFAIEAENSILDISGFSKQYNCAFIWQKDGVKKLNLYLIINYFKGGKLRFKKIKPEAFEANRFYTVINKKSGEIVPMEVNFNFDDPNLIILPLAFGKRQGREFIWNDLLSLETGSLKLANGRVIEKTLYNRRTRQDEPALFVALTFERREVLDSSNIKPMNLIGVDRGENIPAVIALTDPEGCPLSRFKDSLGNPTHILRIGESYKEKQRTIQAKKEVEQRRAGGYSRKYASKAKNLADDMVRNTARDLLYYAVTQDAMLIFENLSRGFGRQGKRTFSAERQYTRMEDWLTAKLAYEGLPSKTYLSKTLAQYTSKTCSNCGFTITSADYDRVLEKLKKTATGWMTTINGKELKVEGQITYYNRYKRQNVVKDLSVELDRLSEESVNNDISSWTKGRSGEALSLLKKRFSHRPVQEKFVCLNCGFETHADEQAALNIARSWLFLRSQEYKKYQTNKTTGNTDKRAFVETWQSFYRKKLKEVWKPAV

SEQ ID NO: 49284 - protein, 979 aa, synthetic construct
  REGION 1..979: note = engineered CasX variant
QEIKRINKIRRRLVKDSNTKKAGKTGPMKTLLVRVMTPDLRERLENLRKKPENIPQPISNTSRANLNKLLTDYTEMKKAILHVYWEEFQKDPVGLMSRVAQPASKKIDQNKLKPEMDEKGNLTTAGFACSQCGQPLFVYKLEQVSEKGKAYTNYFGRCNVAEHEKLILLAQLKPEKDSDEAVTYSLGKFGQRALDFYSIHVTKESTHPVKPLAQIAGNRYASGPVGKALRDACMGTIASFLSKYQDIIIEHQKVVKGNQKRLESLRELAGKENLEYPSVTLPPQPHTKEGVDAYNEVIARVRMWVNLNLWQKLKLSRDDAKPLLRLKGFPSFPLVERQANEVDWWDMVCNVKKLINEKKEDGKVFWQNLAGYKRQEALRPYLSSEEDRKKGKKFARYQLGDLLLHLEKKHGEDWGKVYDEAWERIDKKVEGLSKHIKLEEERRSEDAQSKAALTDWLRAKASFVIEGLKEADDKDEFCRCELKLQKWYGDLRGKPFAIEAENSILDISGFSKQYNCAFIWQKDGVKKLNLYLIINYFKGGKLRFKKIKPEAFEANRFYTVINKKSGEIVPMEVNFNFDDPNLIILPLAFGKRQGREFIWNDLLSLETGSLKLANGRVIEKTLYNRRTRQDEPALFVALTFERREVLDSSNIKPMNLIGVDRGENIPAVIALTDPEGCPLSRFKDSLGNPTHILRIGESYKEKQRTIQAKKEVEQRRAGGYSRKYASKAKNLADDMVRNTARDLLYYAVTQDAMLIFENLSRGFGRQGKRTFSAERQYTRMEDWLTAKLAYEGLPSKTYLSKTLAQYTSKTCSNCGFTITSADYDRVLEKLKKTATGWMTTINGKELKVEGQITYYNRYKRQNVVKDLSVELDRLSEESVNNDISSWTKGRSGEALSLLKKRFSHRPVQEKFVCLNCGFETHADEQAALNIARSWLFLRSQEYKKYQTNKTTGNTDKRAFVETWQSFYRKKLKEVWKPAV

SEQ ID NO: 49285 - protein, 979 aa, synthetic construct
  REGION 1..979: note = engineered CasX variant
QEIKRINKIRRRLVKDSNTKKAGKTGPMKTLLVRVMTPDLRERLENLRKKPENIPQPISNTSRANLNKLLTDYTEMKKAILHVYWEEFQKDPVGLMSRVAQPASKKIDQNKLKPEMDEKGNLTTAGFACSQCGQPLFVYKLEQVSEKGKAYTNYFGRCNVAEHEKLILLAQLKPEKDSDEAVTYSLGKFGQRALDFYSIHVTKESTHPVKPLAQIAGNRYASGPVGKALRDACMGTIASFLSKYQDIIIEHQKVVKGNQKRLESLRELAGKENLEYPSVTLPPQPHTKEGVDAYNEVIARVRMWVNLNLWQKLKLSRDDAKPLLRLKGFPSFPLVERQANEVDWWDMVCNVKKLINEKKEDGKVFWQNLAGYKRQEALRPYLSSEEDRKKGKKFARYQLGDLLLHLEKKHGEDWGKVYDEAWERIDKKVEGLSKHIKLEEERRSEDAQSKAALTDWLRAKASFVIEGLKEADKDEFCRCELKLQKWYGDLRGKPFAIEAENSILDISGFSKQYNCAFIWQKDGVKKLNLYLIINYFKGGKLRFKKIKPEAFEANRFYTVINKKSGEIVPMEVNFNFDDPNLIILPLAFGKRQGREFIWNDLLSLETGSLKLANGRVIEKTLYNRRTRQDEPALFVALTFERREVLDSSNIKPMNLIGVDRGENIPAVIALTDPEGCPLSRFKDSLGNPTHILRIGESYKEKQRTIQAKKEVEQRRAGGYSRKYASKAKNLADDMVRNTARDLLYYAVTQDAMLIFENLSRGFGRQGKRTFSAERQYTRMEDWLTAKLAYEGLPSKTYLSKTLAQYTSKTCSNCGFTITSADYDRVLEKLKKTATGWMTTINGKELKVEGQITYYNRYKRQNVVKDLSVELDRLSEESVNNDISSWTKGRSGNEALSLLKKRFSHRPVQEKFVCLNCGFETHADEQAALNIARSWLFLRSQEYKKYQTNKTTGNTDKRAFVETWQSFYRKKLKEVWKPAV

SEQ ID NO: 49286 - protein, 978 aa, synthetic construct
  REGION 1..978: note = engineered CasX variant
QEIKRINKIRRRLVKDSNTKKAGKTGPMKTLLVRVMTPDLRERLENLRKKPENIPQPISNTSRANLNKLLTDYTEMKKAILHVYWEEFQKDPVGLMSRVAQPASKKIDQNKLKPEMDEKGNLTTAGFACSQCGQPLFVYKLEQVSEKGKAYTNYFGRCNVAEHEKLILLAQLKPEKDSDEAVTYSLGKFGQRALDFYSIHVTKESTHPVKPLAQIAGNRYASGPVGKALRDACMGTIASFLSKYQDIIIEHQKVVKGNQKRLESLRELAGKENLEYPSVTLPPQPHTKEGVDAYNEVIARVRMWVNLNLWQKLKLSRDDAKPLLRLKGFPSFPLVERQANEVDWWDMVCNVKKLINEKKEDGKVFWQNLAGYKRQEALRPYLSSEEDRQKGKKFARYQLGDLLLHLEKKHGEDWGKVYDEAWERIDKKVEGLSKHIKLEEERRSEDAQSKAALTDWLRAKASFVIEGLKEADKDEFCRCELKLQKWYGDLRGKPFAIEAENSILDISGFSKQYNCAFIWQKDGVKKLNLYLIINYFKGGKLRFKKIKPEAFEANRFYTVINKKSGEIVPMEVNFNFDDPNLIILPLAFGKRQGREFIWNDLLSLETGSLKLANGRVIEKTLYNRRTRQDEPALFVALTFERREVLDSSNIKPMNLIGVDRGENIPAVIALTDPEGCPLSRFKDSLGNPTHILRIGESYKEKQRTIQAKKEVEQRRAGGYSRKYASKAKNLADDMVRNTARDLLYYAVTQDAMLIFENLSRGFGRQGKRTFSAERQYTRMEDWLTAKLAYEGLPSKTYLSKTLAQYTSKTCSNCGFTITSADYDRVLEKLKKTATGWMTTINGKELKVEGQITYYNRYKRQNVVKDLSVELDRLSEESVNNDISSWTKGRSGEALSLLKKRFSHRPVQEKFVCLNCGFETHADEQAALNIARSWLFLRSQEYKKYQTNKTTGNTDKRAFVETWQSFYRKKLKEVWKPAV

SEQ ID NO: 49287 - protein, 978 aa, synthetic construct
  REGION 1..978: note = engineered CasX variant
QEIKRINKIRRRLVKDSNTKKAGKTGPMKTLLVRVMTPDLRERLENLRKKPENIPQPISNTSRANLNKLLTDYTEMKKAILHVYWEEFQKDPVGLMSRVAQPASKKIDQNKLKPEMDEKGNLTTAGFACSQCGQPLFVYKLEQVSEKGKAYTNYFGRCNVAEHEKLILLAQLKPEKDSDEAVTYSLGKFGQRALDFYSIHVTKESTHPVKPLAQIAGNRYASGPVGKALRDACMGTIASFLSKYQDIIIEHQKVVKGNQKRLESLRELAGKENLEYPSVTLPPQPHTKEGVDAYNEVIARVRMWVNLNLWQKLKLSRDDAKPLLRLKGFPSFPLVERQANEVDWWDMVCNVKKLINEKKEDGKVFWQNLAGYKRQEALRPYLSSEEDRKKGKKFARYQLGDLLLHLEKKHGEDWGKVYDEAWERIDKKVEGLSKHIKLEEERRSEDAQSKAALTDWLRAKASFVIEGLKEADKDEFCRCELKLQKWYGDLRGKPFAIEAENSILDISGFSKQYNCAFIWQKDGVKKLNLYLIINYFKGGKLRFKKIKPEAFEANRFYTVINKKSGEIVPMEVNFNFDDPNLIILPLAFGKRQGREFIWNDLLSLETGSLKLANGRVIEKTLYNRRTRQDEPALFVALTFERREVLDSSNIKPMNLIGVDRGENIPAVIALTDPEGCPLSRFKDSLGNPTHILRIGESYKEKQRTIQAKKEVEQRRAGGYSRKYASKAKNLADDMVRNTARDLLYYAVTQDAMLIFENLSRGFGRQGKRTFSAERQYTRMEDWLTAKLAYEGLPSQTYLSKTLAQYTSKTCSNCGFTITSADYDRVLEKLKKTATGWMTTINGKELKVEGQITYYNRYKRQNVVKDLSVELDRLSEESVNNDISSWTKGRSGEALSLLKKRFSHRPVQEKFVCLNCGFETHADEQAALNIARSWLFLRSQEYKKYQTNKTTGNTDKRAFVETWQSFYRKKLKEVWKPAV

SEQ ID NO: 49288 - protein, 978 aa, synthetic construct
  REGION 1..978: note = engineered CasX variant
QEIKRINKIRRRLVKDSNTKKAGKTGPMKTLLVRVMTPDLRERLENLRKKPENIPQPISNTSRANLNKLLTDYTEMKKAILHVYWEEFQKDPVGLMSRVAQPASKKIDQNKLKPEMDEKGNLTTAGFACSQCGQPLFVYKLEQVSEKGKAYTNYFGRCNVAEHEKLILLAQLKPEKDSDEAVTYSLGKFGQRALDFYSIHVTKESTHPVKPLAQIAGNRYASGPVGKALRDACMGTIASFLSKYQDIIIEHQKVVKGNQKRLESLRELAGKENLEYPSVTLPPQPHTKEGVDAYNEVIARVRMWVNLNLWQKLKLSRDDAKPLLRLKGFPSFPLVERQANEVDWWDMVCNVKKLINEKKEDGKVFWQNLAGYKRQEALRPYLSSEEDRKKGKKFARYQLGDLLLHLEKKHGEDWGKVYDEAWERIDKKVEGLSKHIKLEEERRSEDAQSKAALTDWLRAKASFVIEGLKEADKDEFCRCELKLQKWYGDLRGKPFAIEAENSILDISGFSKQYNCAFIWQKDGVKKLNLYLIINYFKGGKLRFKKIKPEAFEANRFYTVINKKSGEIVPMEVNFNFDDPNLIILPLAFGKRQGREFIWNDLLSLETGSLKLANGRVIEKTLYNRRTRQDEPALFVALTFERREVLDSSNIKPMNLIGVDRGENIPAVIALTDPEGCPLSRFKDSLGNPTHILRIGESYKEKQRTIQAKKEVEQRRAGGYSRKYASKAKNLADDMVRNTARDLLYYAVTQDAMLIFENLSRGFGRQGKRTFSAERQYTRMEDWLTAKLAYNGLPSKTYLSKTLAQYTSKTCSNCGFTITSADYDRVLEKLKKTATGWMTTINGKELKVEGQITYYNRYKRQNVVKDLSVELDRLSEESVNNDISSWTKGRSGEALSLLKKRFSHRPVQEKFVCLNCGFETHADEQAALNIARSWLFLRSQEYKKYQTNKTTGNTDKRAFVETWQSFYRKKLKEVWKPAV

SEQ ID NO: 49289 - protein, 978 aa, synthetic construct
  REGION 1..978: note = engineered CasX variant
QEIKRINKIRRRLVKDSNTKKAGKTGPMKTLLVRVMTPDLRERLENLRKKPENIPQPISNTSRANLNKLLTDYTEMKKAILHVYWEEFQKDPVGLMSRVAQPASKKIDQNKLKPEMDEKGNLTTAGFACSQCGQPLFVYKLEQVSEKGKAYTNYFGRCNVAEHEKLIQLAQLKPEKDSDEAVTYSLGKFGQRALDFYSIHVTKESTHPVKPLAQIAGNRYASGPVGKALRDACMGTIASFLSKYQDIIIEHQKVVKGNQKRLESLRELAGKENLEYPSVTLPPQPHTKEGVDAYNEVIARVRMWVNLNLWQKLKLSRDDAKPLLRLKGFPSFPLVERQANEVDWWDMVCNVKKLINEKKEDGKVFWQNLAGYKRQEALRPYLSSEEDRKKGKKFARYQLGDLLLHLEKKHGEDWGKVYDEAWERIDKKVEGLSKHIKLEEERRSEDAQSKAALTDWLRAKASFVIEGLKEADKDEFCRCELKLQKWYGDLRGKPFAIEAENSILDISGFSKQYNCAFIWQKDGVKKLNLYLIINYFKGGKLRFKKIKPEAFEANRFYTVINKKSGEIVPMEVNFNFDDPNLIILPLAFGKRQGREFIWNDLLSLETGSLKLANGRVIEKTLYNRRTRQDEPALFVALTFERREVLDSSNIKPMNLIGVDRGENIPAVIALTDPEGCPLSRFKDSLGNPTHILRIGESYKEKQRTIQAKKEVEQRRAGGYSRKYASKAKNLADDMVRNTARDLLYYAVTQDAMLIFENLSRGFGRQGKRTFSAERQYTRMEDWLTAKLAYEGLPSKTYLSKTLAQYTSKTCSNCGFTITSADYDRVLEKLKKTATGWMTTINGKELKVEGQITYYNRYKRQNVVKDLSVELDRLSEESVNNDISSWTKGRSGEALSLLKKRFSHRPVQEKFVCLNCGFETHADEQAALNIARSWLFLRSQEYKKYQTNKTTGNTDKRAFVETWQSFYRKKLKEVWKPAV

SEQ ID NO: 49290 - protein, 978 aa, synthetic construct
  REGION 1..978: note = engineered CasX variant
QEIKRINKIRRRLVKDSNTKKAGKTGPMKTLLVRVMTPDLRERLENLRKKPENIPQPISNTSRANLNKLLTDYTEMKKAILHVYWEEFQKDPVGLMSRVAQPASKKIDQNKLKPEMDEKGNLTTAGFACSQCGQPLFVYKLEQVSEKGKAYTNYFGRCNVAEHEKLILLAQLKPEKDSDEAVTYSLGKFGQRALDFYSIHVTKESTHPVKPLAQIAGNRYASGPVGKALRDACMGTIASFLSKYQDIIIEHQKVVKGNQKRLESLRELAGKENLEYPSVTLPPQPHTKEGVDAYNEVIARVRMWVNLNLWQKLKLSRDDAKPLLRLKGFPSFPLVERQANEVDWWDMVCNVKKLINEKKEDGKVFWQNLAIYKRQEALRPYLSSEEDRKKGKKFARYQLGDLLLHLEKKHGEDWGKVYDEAWERIDKKVEGLSKHIKLEEERRSEDAQSKAALTDWLRAKASFVIEGLKEADKDEFCRCELKLQKWYGDLRGKPFAIEAENSILDISGFSKQYNCAFIWQKDGVKKLNLYLIINYFKGGKLRFKKIKPEAFEANRFYTVINKKSGEIVPMEVNFNFDDPNLIILPLAFGKRQGREFIWNDLLSLETGSLKLANGRVIEKTLYNRRTRQDEPALFVALTFERREVLDSSNIKPMNLIGVDRGENIPAVIALTDPEGCPLSRFKDSLGNPTHILRIGESYKEKQRTIQAKKEVEQRRAGGYSRKYASKAKNLADDMVRNTARDLLYYAVTQDAMLIFENLSRGFGRQGKRTFSAERQYTRMEDWLTAKLAYEGLPSKTYLSKTLAQYTSKTCSNCGFTITSADYDRVLEKLKKTATGWMTTINGKELKVEGQITYYNRYKRQNVVKDLSVELDRLSEESVNNDISSWTKGRSGEALSLLKKRFSHRPVQEKFVCLNCGFETHADEQAALNIARSWLFLRSQEYKKYQTNKTTGNTDKRAFVETWQSFYRKKLKEVWKPAV

SEQ ID NO: 49291 - protein, 978 aa, synthetic construct
  REGION 1..978: note = engineered CasX variant
QEIKRINKIRRRLVKDSNTKKAGKTGPMKTLLVRVMTPDLRERLENLRKKPENIPQPISNTSRANLNKLLTDYTEMKKAILHVYWEEFQKDPVGLMSRVAQPASKKIDQNKLKPEMDEKGNLTTAGFACSQCGQPLFVYKLEQVSEKGKAYTNYFGRCNVAEHEKLILLAQLKPEKDSDEAVTYSLGKFGQRALDFYSIHVTKESTHPVKPLAQIAGNRYASGPVGKALRDACMGTIASFLSKYQDIIIEHQKVVKGNQKRLESLRELAGKENLEYPSVTLPPQPHTKEGVDAYNEVIARVRMWVNLNLWQKLKLSRDDAKPLLRLKGFPSFPLVERQANEVDWWDMVCNVKKLINEKKEDGKVFWQNLAGYKRQEALRPYLSSEEDREKGKKFARYQLGDLLLHLEKKHGEDWGKVYDEAWERIDKKVEGLSKHIKLEEERRSEDAQSKAALTDWLRAKASFVIEGLKEADKDEFCRCELKLQKWYGDLRGKPFAIEAENSILDISGFSKQYNCAFIWQKDGVKKLNLYLIINYFKGGKLRFKKIKPEAFEANRFYTVINKKSGEIVPMEVNFNFDDPNLIILPLAFGKRQGREFIWNDLLSLETGSLKLANGRVIEKTLYNRRTRQDEPALFVALTFERREVLDSSNIKPMNLIGVDRGENIPAVIALTDPEGCPLSRFKDSLGNPTHILRIGESYKEKQRTIQAKKEVEQRRAGGYSRKYASKAKNLADDMVRNTARDLLYYAVTQDAMLIFENLSRGFGRQGKRTFSAERQYTRMEDWLTAKLAYEGLPSKTYLSKTLAQYTSKTCSNCGFTITSADYDRVLEKLKKTATGWMTTINGKELKVEGQITYYNRYKRQNVVKDLSVELDRLSEESVNNDISSWTKGRSGEALSLLKKRFSHRPVQEKFVCLNCGFETHADEQAALNIARSWLFLRSQEYKKYQTNKTTGNTDKRAFVETWQSFYRKKLKEVWKPAV

SEQ ID NO: 49292 - protein, 978 aa, synthetic construct
  REGION 1..978: note = engineered CasX variant
QEIKRINKIRRRLVKDSNTKKAGKTGPMKTLLVRVMTPDLRERLENLRKKPENIPQPISNTSRANLNKLLTDYTEMKKAILHVYWEEFQKDPVGLMSRVAQPASKKIDQNKLKPEMDEKGNLTTAGFACSQCGQPLFVYKLEQVSEKGKAYTNYFGRCNVAEHEKLILLAQLKPEKDSDEAVTYSLGKFGQRALDFYSIHVTKESTHPVKPLAQIAGNRYASGPVGKALRDACMGTIASFLSKYQDIIIEHQKVVKGNQKRLESLRELAGKENLEYPSVTLPPQPHTKEGVDAYNEVIARVRMWVNLNLWQKLKLSRDDAKPLLRLKGFPSFPLVERQANEVDWWDMVCNVKKLINEKKEDGKVFWQNLAGYKRQEALRPYLSSEEDRKKGKKFARYQLGDLLLHLEKKHGEDWGKVYDEAWERIDKKVEGLSKHIKLEEERRSEDAQSKAALTDWLRAKASFVIEGLKEADKDEFCRCELKLQKWYGDLRGKPFAIEAENSILDISGFSKQYNCAFIWQKDGVKKLNLYLIINYFKGGKLRFKKIKPEAFEANRFYTVINKKSGEIVIMEVNFNFDDPNLIILPLAFGKRQGREFIWNDLLSLETGSLKLANGRVIEKTLYNRRTRQDEPALFVALTFERREVLDSSNIKPMNLIGVDRGENIPAVIALTDPEGCPLSRFKDSLGNPTHILRIGESYKEKQRTIQAKKEVEQRRAGGYSRKYASKAKNLADDMVRNTARDLLYYAVTQDAMLIFENLSRGFGRQGKRTFSAERQYTRMEDWLTAKLAYEGLPSKTYLSKTLAQYTSKTCSNCGFTITSADYDRVLEKLKKTATGWMTTINGKELKVEGQITYYNRYKRQNVVKDLSVELDRLSEESVNNDISSWTKGRSGEALSLLKKRFSHRPVQEKFVCLNCGFETHADEQAALNIARSWLFLRSQEYKKYQTNKTTGNTDKRAFVETWQSFYRKKLKEVWKPAV

SEQ ID NO: 49293 - protein, 978 aa, synthetic construct
  REGION 1..978: note = engineered CasX variant
QEIKRINKIRRRLVKDSNTKKAGKTGPMKTLLVRVMTPDLRERLENLRKKPENIPQPISNTSRANLNKLLTDYTEMKKAILHVYWEEFQKDPVGLMSRVAQPASKKIDQNKLKPEMDEKGNLTTAGFACSQCGQPLFVYKLEQVSEKGKAYTNYFGRCNVAEHEKLILLAQLKPEKDSDEAVTYSLGKFGQRALDFYSIHVTKESTHPVKPLAQIAGNRYASGPVGKALRGACMGTIASFLSKYQDIIIEHQKVVKGNQKRLESLRELAGKENLEYPSVTLPPQPHTKEGVDAYNEVIARVRMWVNLNLWQKLKLSRDDAKPLLRLKGFPSFPLVERQANEVDWWDMVCNVKKLINEKKEDGKVFWQNLAGYKRQEALRPYLSSEEDRKKGKKFARYQLGDLLLHLEKKHGEDWGKVYDEAWERIDKKVEGLSKHIKLEEERRSEDAQSKAALTDWLRAKASFVIEGLKEADKDEFCRCELKLQKWYGDLRGKPFAIEAENSILDISGFSKQYNCAFIWQKDGVKKLNLYLIINYFKGGKLRFKKIKPEAFEANRFYTVINKKSGEIVPMEVNFNFDDPNLIILPLAFGKRQGREFIWNDLLSLETGSLKLANGRVIEKTLYNRRTRQDEPALFVALTFERREVLDSSNIKPMNLIGVDRGENIPAVIALTDPEGCPLSRFKDSLGNPTHILRIGESYKEKQRTIQAKKEVEQRRAGGYSRKYASKAKNLADDMVRNTARDLLYYAVTQDAMLIFENLSRGFGRQGKRTFMAERQYTRMEDWLTAKLAYEGLPSKTYLSKTLAQYTSKTCSNCGFTITSADYDRVLEKLKKTATGWMTTINGKELKVEGQITYYNRYKRQNVVKDLSVELDRLSEESVNNDISSWDKGRSGEALSLLKKRFSHRPVQEKFVCLNCGFETHADEQAALNIARSWLFLRSQEYKKYQTNKTTGNTDKRAFVETWQSFYRKKLKEVWKPAV

SEQ ID NO: 49294 - protein, 978 aa, synthetic construct
  REGION 1..978: note = engineered CasX variant
QEIKRINKIRRRLVKDSNTKKAGKTGPMKTLLVRVMTPDLRERLENLRKKPENIPQPISNTSRANLNKLLTDYTEMKKAILHVYWEEFQKDPVGLMSRVAQPASKKIDQNKLKPEMDEKGNLTTAGFACSQCGQPLFVYKLEQVSEKGKAYTNYFGRCNVAEHEKLILLAQLKPEKDSDEAVTYSLGKFGQRALDFYSIHVTKESTHPVKPLAQIAGNRYASGPVGKALRDACMGTIASFLSKYQDIIIEHQKVVKGNQKRLESLRELAGKENLEYPSVTLPPQPHTKEGVDAYNEVIARVRMWVNLNLWQKLKLSRDDAKPLLRLKNFPSFPLVERQANEVDWWDMVCNVKKLINEKKEDGKVFWQNLAGYKRQEALRPYLSSEEDRKKGKKFARYQLGDLLLHLEKKHGEDWGKVYDEAWERIDKKVEGLSKHIKLEEERRSEDAQSKAALTDWLRAKASFVIEGLKEADKDEFCRCELKLQKWYGDLRGKPFAIEAENSILDISGFSKQYNCAFIWQKDGVKKLNLYLIINYFKGGKLRFKKIKPEAFEANRFYTVINKKSGEIVPMEVNFNFDDPNLIILPLAFGKRQGREFIWNDLLSLETGSLKLANGRVIEKTLYNRRTRQDEPALFVALTFERREVLDSSNIKPMNLIGVDRGENIPAVIALTDPEGCPLSRFKDSLGNPTHILRIGESYKEKQRTIQAKKEVEQRRAGGYSRKYASKAKNLADDMVRNTARDLLYYAVTQDAMLIFENLSRGFGRQGKRTFMAERQYTRMEDWLTAKLAYEGLPSKTYLSKTLAQYTSKTCSNCGFTITSADYDRVLEKLKKTATGWMTTINGKELKVEGQITYYNRYKRQNVVKDLSVELDRLSEESVNNDISSWDKGRSGEALSLLKKRFSHRPVQEKFVCLNCGFETHADEQAALNIARSWLFLRSQEYKKYQTNKTTGNTDKRAFVETWQSFYRKKLKEVWKPAV

SEQ ID NO: 49295 - protein, 978 aa, synthetic construct
  REGION 1..978: note = engineered CasX variant
QEIKRINKIRRRLVKDSNTKKAGKTGPMKTLLVRVMTPDLRERLENLRKKPENIPQPISNTSRANLNKLLTDYTEMKKAILHVYWEEFQKDPVGLMSRVAQPASKKIDQNKLKPEMDEKGNLTTAGFACSQCGQPLFVYKLEQVSEKGKAYTNYFGRCNVAEHEKLILLAQLKPEKDSDEAVTYSLGKFGQRALDFYSIHVTKESTHPVKPLAQIAGNRYASGPVGKALRDACMGTIASFLSKYQDIIIEHQKVVKGNQKRLESLRELAGKENLEYPSVTLPPQPHTKEGVDAYNEVIARVRMWVNLNLWQKLKLSRDDAKPLLRLKGFPSFPLVERQANEVDWWDMVCNVKKLINEKKEDGKVFWQNLAGYKRQEALRPYLSSEEDRKKGKKFARYQLGDLLNHLEKKHGEDWGKVYDEAWERIDKKVEGLSKHIKLEEERRSEDAQSKAALTDWLRAKASFVIEGLKEADKDEFCRCELKLQKWYGDLRGKPFAIEAENSILDISGFSKQYNCAFIWQKDGVKKLNLYLIINYFKGGKLRFKKIKPEAFEANRFYTVINKKSGEIVPMEVNFNFDDPNLIILPLAFGKRQGREFIWNDLLSLETGSLKLANGRVIEKTLYNRRTRQDEPALFVALTFERREVLDSSNIKPMNLIGVDRGENIPAVIALTDPEGCPLSRFKDSLGNPTHILRIGESYKEKQRTIQAKKEVEQRRAGGYSRKYASKAKNLADDMVRNTARDLLYYAVTQDAMLIFENLSRGFGRQGKRTFMAERQYTRMEDWLTAKLAYEGLPSKTYLSKTLAQYTSKTCSNCGFTITSADYDRVLEKLKKTATGWMTTINGKELKVEGQITYYNRYKRQNVVKDLSVELDRLSEESVNNDISSWDKGRSGEALSLLKKRFSHRPVQEKFVCLNCGFETHADEQAALNIARSWLFLRSQEYKKYQTNKTTGNTDKRAFVETWQSFYRKKLKEVWKPAV

SEQ ID NO: 49296 - protein, 978 aa, synthetic construct
  REGION 1..978: note = engineered CasX variant
QEIKRINKIRRRLVKDSNTKKAGKTGPMKTLLVRVMTPDLRERLENLRKKPENIPQPISNTSRANLNKLLTDYTEMKKAILHVYWEEFQKDPVGLMSRVAQPASKKIDQNKLKPEMDEKGNLTTAGFACSQCGQPLFVYKLEQVSEKGKAYTNYFGRCNVAEHEKLILLAQLKPEKDSDEAVTYSLGKFGQRALDFYSIHVTKESTHPVKPLAQIAGNRYASGPVGKALRDACMGTIASFLSKYQDIIIEHQKVVKGNQKRLESLRELAGKENLEYPSVTLPPQPHTKEGVDAYNEVIARVRMWVNLNLWQKLKLSRDDAKPLLRLKGFPSFPLVERQANEVDWWDMVCNVKKLINEKKEDGKVFWQNLAGYKRQEALRPYLSSEEDRKKGKKFARYQLGDLLWHLEKKHGEDWGKVYDEAWERIDKKVEGLSKHIKLEEERRSEDAQSKAALTDWLRAKASFVIEGLKEADKDEFCRCELKLQKWYGDLRGKPFAIEAENSILDISGFSKQYNCAFIWQKDGVKKLNLYLIINYFKGGKLRFKKIKPEAFEANRFYTVINKKSGEIVPMEVNFNFDDPNLIILPLAFGKRQGREFIWNDLLSLETGSLKLANGRVIEKTLYNRRTRQDEPALFVALTFERREVLDSSNIKPMNLIGVDRGENIPAVIALTDPEGCPLSRFKDSLGNPTHILRIGESYKEKQRTIQAKKEVEQRRAGGYSRKYASKAKNLADDMVRNTARDLLYYAVTQDAMLIFENLSRGFGRQGKRTFMAERQYTRMEDWLTAKLAYEGLPSKTYLSKTLAQYTSKTCSNCGFTITSADYDRVLEKLKKTATGWMTTINGKELKVEGQITYYNRYKRQNVVKDLSVELDRLSEESVNNDISSWDKGRSGEALSLLKKRFSHRPVQEKFVCLNCGFETHADEQAALNIARSWLFLRSQEYKKYQTNKTTGNTDKRAFVETWQSFYRKKLKEVWKPAV

SEQ ID NO: 49297 - protein, 978 aa, synthetic construct
  REGION 1..978: note = engineered CasX variant
QEIKRINKIRRRLVKDSNTKKAGKTGPMKTLLVRVMTPDLRERLENLRKKPENIPQPISNTSRANLNKLLTDYTEMKKAILHVYWEEFQKDPVGLMSRVAQPASKKIDQNKLKPEMDEKGNLTTAGFACSQCGQPLFVYKLEQVSEKGKAYTNYFGRCNVAEHEKLILLAQLKPEKDSDEAVTYSLGKFGQRALDFYSIHVTKESTHPVKPLAQIAGNRYASGPVGKALRDACMGTIASFLSKYQDIIIEHQKVVKGNQKRLESLRELAGKENLEYPSVTLPPQPHTKEGVDAYNEVIARVRMWVNLNLWQKLKLSRDDAKPLLRLKGFPSFPLVERQANEVDWWDMVCNVKKLINEKKEDGKVFWQNLAGYKRQEALRPYLSSEEDRKKGKKFARYQLGDLLLHLYKKHGEDWGKVYDEAWERIDKKVEGLSKHIKLEEERRSEDAQSKAALTDWLRAKASFVIEGLKEADKDEFCRCELKLQKWYGDLRGKPFAIEAENSILDISGFSKQYNCAFIWQKDGVKKLNLYLIINYFKGGKLRFKKIKPEAFEANRFYTVINKKSGEIVPMEVNFNFDDPNLIILPLAFGKRQGREFIWNDLLSLETGSLKLANGRVIEKTLYNRRTRQDEPALFVALTFERREVLDSSNIKPMNLIGVDRGENIPAVIALTDPEGCPLSRFKDSLGNPTHILRIGESYKEKQRTIQAKKEVEQRRAGGYSRKYASKAKNLADDMVRNTARDLLYYAVTQDAMLIFENLSRGFGRQGKRTFMAERQYTRMEDWLTAKLAYEGLPSKTYLSKTLAQYTSKTCSNCGFTITSADYDRVLEKLKKTATGWMTTINGKELKVEGQITYYNRYKRQNVVKDLSVELDRLSEESVNNDISSWDKGRSGEALSLLKKRFSHRPVQEKFVCLNCGFETHADEQAALNIARSWLFLRSQEYKKYQTNKTTGNTDKRAFVETWQSFYRKKLKEVWKPAV

SEQ ID NO: 49298 - protein, 978 aa, synthetic construct
  REGION 1..978: note = engineered CasX variant
QEIKRINKIRRRLVKDSNTKKAGKTGPMKTLLVRVMTPDLRERLENLRKKPENIPQPISNTSRANLNKLLTDYTEMKKAILHVYWEEFQKDPVGLMSRVAQPASKKIDQNKLKPEMDEKGNLTTAGFACSQCGQPLFVYKLEQVSEKGKAYTNYFGRCNVAEHEKLILLAQLKPEKDSDEAVTYSLGKFGQRALDFYSIHVTKESTHPVKPLAQIAGNRYASGPVGKALRDACMGTIASFLSKYQDIIIEHQKVVKGNQKRLESLRELAGKENLEYPSVTLPPQPHTKEGVDAYNEVIARVRMWVNLNLWQKLKLSRDDAKPLLRLKGFPSFPLVERQANEVDWWDMVCNVKKLINEKKEDGKVFWQNLAGYKRQEALRPYLSSEEDRKKGKKFARYQLGDLLLHLEKKHPEDWGKVYDEAWERIDKKVEGLSKHIKLEEERRSEDAQSKAALTDWLRAKASFVIEGLKEADKDEFCRCELKLQKWYGDLRGKPFAIEAENSILDISGFSKQYNCAFIWQKDGVKKLNLYLIINYFKGGKLRFKKIKPEAFEANRFYTVINKKSGEIVPMEVNFNFDDPNLIILPLAFGKRQGREFIWNDLLSLETGSLKLANGRVIEKTLYNRRTRQDEPALFVALTFERREVLDSSNIKPMNLIGVDRGENIPAVIALTDPEGCPLSRFKDSLGNPTHILRIGESYKEKQRTIQAKKEVEQRRAGGYSRKYASKAKNLADDMVRNTARDLLYYAVTQDAMLIFENLSRGFGRQGKRTFMAERQYTRMEDWLTAKLAYEGLPSKTYLSKTLAQYTSKTCSNCGFTITSADYDRVLEKLKKTATGWMTTINGKELKVEGQITYYNRYKRQNVVKDLSVELDRLSEESVNNDISSWDKGRSGEALSLLKKRFSHRPVQEKFVCLNCGFETHADEQAALNIARSWLFLRSQEYKKYQTNKTTGNTDKRAFVETWQSFYRKKLKEVWKPAV

SEQ ID NO: 49299 - protein, 979 aa, synthetic construct
  REGION 1..979: note = engineered CasX variant
QEIKRINKIRRRLVKDSNTKKAGKTGPMKTLLVRVMTPDLRERLENLRKKPENIPQPISNTSRANLNKLLTDYTEMKKAILHVYWEEFQKDPVGLMSRVAQPASKKIDQNKLKPEMDEKGNLTTAGFACSQCGQPLFVYKLEQVSEKGKAYTNYFGRCNVAEHEKLILLAQLKPEKDSDEAVTYSLGKFGQRALDFYSIHVTKESTHPVKPLAQIAGNRYASGPVGKALRDACMGTIASFLSKYQDIIIEHQKVVKGNQKRLESLRELAGKENLEYPSVTLPPQPHTKEGVDAYNEVIARVRMWVNLNLWQKLKLSRDDAKPLLRLKGFPSFPLVERQANEVDWWDMVCNVKKLINEKKEDGKVFWQNLAGYKRQEALRPYLSSEEDRKKGKKFARYQLGDLLLHLEKKHGERDWGKVYDEAWERIDKKVEGLSKHIKLEEERRSEDAQSKAALTDWLRAKASFVIEGLKEADKDEFCRCELKLQKWYGDLRGKPFAIEAENSILDISGFSKQYNCAFIWQKDGVKKLNLYLIINYFKGGKLRFKKIKPEAFEANRFYTVINKKSGEIVPMEVNFNFDDPNLIILPLAFGKRQGREFIWNDLLSLETGSLKLANGRVIEKTLYNRRTRQDEPALFVALTFERREVLDSSNIKPMNLIGVDRGENIPAVIALTDPEGCPLSRFKDSLGNPTHILRIGESYKEKQRTIQAKKEVEQRRAGGYSRKYASKAKNLADDMVRNTARDLLYYAVTQDAMLIFENLSRGFGRQGKRTFMAERQYTRMEDWLTAKLAYEGLPSKTYLSKTLAQYTSKTCSNCGFTITSADYDRVLEKLKKTATGWMTTINGKELKVEGQITYYNRYKRQNVVKDLSVELDRLSEESVNNDISSWDKGRSGEALSLLKKRFSHRPVQEKFVCLNCGFETHADEQAALNIARSWLFLRSQEYKKYQTNKTTGNTDKRAFVETWQSFYRKKLKEVWKPAV

SEQ ID NO: 49300 - protein, 979 aa, synthetic construct
  REGION 1..979: note = engineered CasX variant
QEIKRINKIRRRLVKDSNTKKAGKTGPMKTLLVRVMTPDLRERLENLRKKPENIPQPISNTSRANLNKLLTDYTEMKKAILHVYWEEFQKDPVGLMSRVAQPASKKIDQNKLKPEMDEKGNLTTAGFACSQCGQPLFVYKLEQVSEKGKAYTNYFGRCNVAEHEKLILLAQLKPEKDSDEAVTYSLGKFGQRALDFYSIHVTKESTHPVKPLAQIAGNRYASGPVGKALRDACMGTIASFLSKYQDIIIEHQKVVKGNQKRLESLRELAGKENLEYPSVTLPPQPHTKEGVDAYNEVIARVRMWVNLNLWQKLKLSRDDAKPLLRLKGFPSFPLVERQANEVDWWDMVCNVKKLINEKKEDGKVFWQNLAGYKRQEALRPYLSSEEDRKKGKKFARYQLGDLLLHLEKKHGEYDWGKVYDEAWERIDKKVEGLSKHIKLEEERRSEDAQSKAALTDWLRAKASFVIEGLKEADKDEFCRCELKLQKWYGDLRGKPFAIEAENSILDISGFSKQYNCAFIWQKDGVKKLNLYLIINYFKGGKLRFKKIKPEAFEANRFYTVINKKSGEIVPMEVNFNFDDPNLIILPLAFGKRQGREFIWNDLLSLETGSLKLANGRVIEKTLYNRRTRQDEPALFVALTFERREVLDSSNIKPMNLIGVDRGENIPAVIALTDPEGCPLSRFKDSLGNPTHILRIGESYKEKQRTIQAKKEVEQRRAGGYSRKYASKAKNLADDMVRNTARDLLYYAVTQDAMLIFENLSRGFGRQGKRTFMAERQYTRMEDWLTAKLAYEGLPSKTYLSKTLAQYTSKTCSNCGFTITSADYDRVLEKLKKTATGWMTTINGKELKVEGQITYYNRYKRQNVVKDLSVELDRLSEESVNNDISSWDKGRSGEALSLLKKRFSHRPVQEKFVCLNCGFETHADEQAALNIARSWLFLRSQEYKKYQTNKTTGNTDKRAFVETWQSFYRKKLKEVWKPAV

SEQ ID NO: 49301 - protein, 978 aa, synthetic construct
  REGION 1..978: note = engineered CasX variant
QEIKRINKIRRRLVKDSNTKKAGKTGPMKTLLVRVMTPDLRERLENLRKKPENIPQPISNTSRANLNKLLTDYTEMKKAILHVYWEEFQKDPVGLMSRVAQPASKKIDQNKLKPEMDEKGNLTTAGFACSQCGQPLFVYKLEQVSEKGKAYTNYFGRCNVAEHEKLILLAQLKPEKDSDEAVTYSLGKFGQRALDFYSIHVTKESTHPVKPLAQIAGNRYASGPVGKALRDACMGTIASFLSKYQDIIIEHQKVVKGNQKRLESLRELAGKENLEYPSVTLPPQPHTKEGVDAYNEVIARVRMWVNLNLWQKLKLSRDDAKPLLRLKGFPSFPLVERQANEVDWWDMVCNVKKLINEKKEDGKVFWQNLAGYKRQEALRPYLSSEEDRKKGKKFARYQLGDLLLHLEKKHGEDWGDVYDEAWERIDKKVEGLSKHIKLEEERRSEDAQSKAALTDWLRAKASFVIEGLKEADKDEFCRCELKLQKWYGDLRGKPFAIEAENSILDISGFSKQYNCAFIWQKDGVKKLNLYLIINYFKGGKLRFKKIKPEAFEANRFYTVINKKSGEIVPMEVNFNFDDPNLIILPLAFGKRQGREFIWNDLLSLETGSLKLANGRVIEKTLYNRRTRQDEPALFVALTFERREVLDSSNIKPMNLIGVDRGENIPAVIALTDPEGCPLSRFKDSLGNPTHILRIGESYKEKQRTIQAKKEVEQRRAGGYSRKYASKAKNLADDMVRNTARDLLYYAVTQDAMLIFENLSRGFGRQGKRTFMAERQYTRMEDWLTAKLAYEGLPSKTYLSKTLAQYTSKTCSNCGFTITSADYDRVLEKLKKTATGWMTTINGKELKVEGQITYYNRYKRQNVVKDLSVELDRLSEESVNNDISSWDKGRSGEALSLLKKRFSHRPVQEKFVCLNCGFETHADEQAALNIARSWLFLRSQEYKKYQTNKTTGNTDKRAFVETWQSFYRKKLKEVWKPAV

SEQ ID NO: 49302 - protein, 978 aa, synthetic construct
  REGION 1..978: note = engineered CasX variant
QEIKRINKIRRRLVKDSNTKKAGKTGPMKTLLVRVMTPDLRERLENLRKKPENIPQPISNTSRANLNKLLTDYTEMKKAILHVYWEEFQKDPVGLMSRVAQPASKKIDQNKLKPEMDEKGNLTTAGFACSQCGQPLFVYKLEQVSEKGKAYTNYFGRCNVAEHEKLILLAQLKPEKDSDEAVTYSLGKFGQRALDFYSIHVTKESTHPVKPLAQIAGNRYASGPVGKALRDACMGTIASFLSKYQDIIIEHQKVVKGNQKRLESLRELAGKENLEYPSVTLPPQPHTKEGVDAYNEVIARVRMWVNLNLWQKLKLSRDDAKPLLRLKGFPSFPLVERQANEVDWWDMVCNVKKLINEKKEDGKVFWQNLAGYKRQEALRPYLSSEEDRKKGKKFARYQLGDLLLHLEKKHGEDWGKVYGEAWERIDKKVEGLSKHIKLEEERRSEDAQSKAALTDWLRAKASFVIEGLKEADKDEFCRCELKLQKWYGDLRGKPFAIEAENSILDISGFSKQYNCAFIWQKDGVKKLNLYLIINYFKGGKLRFKKIKPEAFEANRFYTVINKKSGEIVPMEVNFNFDDPNLIILPLAFGKRQGREFIWNDLLSLETGSLKLANGRVIEKTLYNRRTRQDEPALFVALTFERREVLDSSNIKPMNLIGVDRGENIPAVIALTDPEGCPLSRFKDSLGNPTHILRIGESYKEKQRTIQAKKEVEQRRAGGYSRKYASKAKNLADDMVRNTARDLLYYAVTQDAMLIFENLSRGFGRQGKRTFMAERQYTRMEDWLTAKLAYEGLPSKTYLSKTLAQYTSKTCSNCGFTITSADYDRVLEKLKKTATGWMTTINGKELKVEGQITYYNRYKRQNVVKDLSVELDRLSEESVNNDISSWDKGRSGEALSLLKKRFSHRPVQEKFVCLNCGFETHADEQAALNIARSWLFLRSQEYKKYQTNKTTGNTDKRAFVETWQSFYRKKLKEVWKPAV

SEQ ID NO: 49303 - protein, 978 aa, synthetic construct
  REGION 1..978: note = engineered CasX variant
QEIKRINKIRRRLVKDSNTKKAGKTGPMKTLLVRVMTPDLRERLENLRKKPENIPQPISNTSRANLNKLLTDYTEMKKAILHVYWEEFQKDPVGLMSRVAQPASKKIDQNKLKPEMDEKGNLTTAGFACSQCGQPLFVYKLEQVSEKGKAYTNYFGRCNVAEHEKLILLAQLKPEKDSDEAVTYSLGKFGQRALDFYSIHVTKESTHPVKPLAQIAGNRYASGPVGKALRDACMGTIASFLSKYQDIIIEHQKVVKGNQKRLESLRELAGKENLEYPSVTLPPQPHTKEGVDAYNEVIARVRMWVNLNLWQKLKLSRDDAKPLLRLKGFPSFPLVERQANEVDWWDMVCNVKKLINEKKEDGKVFWQNLAGYKRQEALRPYLSSEEDRKKGKKFARYQLGDLLLHLEKKHGEDWGKVYDEAWERIDKKVEGLSKHIKLEEERRSEDAQSKAALTDWLRAKASFVIEGKKEADKDEFCRCELKLQKWYGDLRGKPFAIEAENSILDISGFSKQYNCAFIWQKDGVKKLNLYLIINYFKGGKLRFKKIKPEAFEANRFYTVINKKSGEIVPMEVNFNFDDPNLIILPLAFGKRQGREFIWNDLLSLETGSLKLANGRVIEKTLYNRRTRQDEPALFVALTFERREVLDSSNIKPMNLIGVDRGENIPAVIALTDPEGCPLSRFKDSLGNPTHILRIGESYKEKQRTIQAKKEVEQRRAGGYSRKYASKAKNLADDMVRNTARDLLYYAVTQDAMLIFENLSRGFGRQGKRTFMAERQYTRMEDWLTAKLAYEGLPSKTYLSKTLAQYTSKTCSNCGFTITSADYDRVLEKLKKTATGWMTTINGKELKVEGQITYYNRYKRQNVVKDLSVELDRLSEESVNNDISSWDKGRSGEALSLLKKRFSHRPVQEKFVCLNCGFETHADEQAALNIARSWLFLRSQEYKKYQTNKTTGNTDKRAFVETWQSFYRKKLKEVWKPAV

SEQ ID NO: 49304 - protein, 978 aa, synthetic construct
  REGION 1..978: note = engineered CasX variant
QEIKRINKIRRRLVKDSNTKKAGKTGPMKTLLVRVMTPDLRERLENLRKKPENIPQPISNTSRANLNKLLTDYTEMKKAILHVYWEEFQKDPVGLMSRVAQPASKKIDQNKLKPEMDEKGNLTTAGFACSQCGQPLFVYKLEQVSEKGKAYTNYFGRCNVAEHEKLILLAQLKPEKDSDEAVTYSLGKFGQRALDFYSIHVTKESTHPVKPLAQIAGNRYASGPVGKALRDACMGTIASFLSKYQDIIIEHQKVVKGNQKRLESLRELAGKENLEYPSVTLPPQPHTKEGVDAYNEVIARVRMWVNLNLWQKLKLSRDDAKPLLRLKGFPSFPLVERQANEVDWWDMVCNVKKLINEKKEDGKVFWQNLAGYKRQEALRPYLSSEEDRKKGKKFARYQLGDLLLHLEKKHGEDWGKVYDEAWERIDKKVEGLSKHIKLEEERRSEDAQSKAALTDWLRAKASFVIEGSKEADKDEFCRCELKLQKWYGDLRGKPFAIEAENSILDISGFSKQYNCAFIWQKDGVKKLNLYLIINYFKGGKLRFKKIKPEAFEANRFYTVINKKSGEIVPMEVNFNFDDPNLIILPLAFGKRQGREFIWNDLLSLETGSLKLANGRVIEKTLYNRRTRQDEPALFVALTFERREVLDSSNIKPMNLIGVDRGENIPAVIALTDPEGCPLSRFKDSLGNPTHILRIGESYKEKQRTIQAKKEVEQRRAGGYSRKYASKAKNLADDMVRNTARDLLYYAVTQDAMLIFENLSRGFGRQGKRTFMAERQYTRMEDWLTAKLAYEGLPSKTYLSKTLAQYTSKTCSNCGFTITSADYDRVLEKLKKTATGWMTTINGKELKVEGQITYYNRYKRQNVVKDLSVELDRLSEESVNNDISSWDKGRSGEALSLLKKRFSHRPVQEKFVCLNCGFETHADEQAALNIARSWLFLRSQEYKKYQTNKTTGNTDKRAFVETWQSFYRKKLKEVWKPAV

SEQ ID NO: 49305 - protein, 979 aa, synthetic construct
  REGION 1..979: note = engineered CasX variant
QEIKRINKIRRRLVKDSNTKKAGKTGPMKTLLVRVMTPDLRERLENLRKKPENIPQPISNTSRANLNKLLTDYTEMKKAILHVYWEEFQKDPVGLMSRVAQPASKKIDQNKLKPEMDEKGNLTTAGFACSQCGQPLFVYKLEQVSEKGKAYTNYFGRCNVAEHEKLILLAQLKPEKDSDEAVTYSLGKFGQRALDFYSIHVTKESTHPVKPLAQIAGNRYASGPVGKALRDACMGTIASFLSKYQDIIIEHQKVVKGNQKRLESLRELAGKENLEYPSVTLPPQPHTKEGVDAYNEVIARVRMWVNLNLWQKLKLSRDDAKPLLRLKGFPSFPLVERQANEVDWWDMVCNVKKLINEKKEDGKVFWQNLAGYKRQEALRPYLSSEEDRKKGKKFARYQLGDLLLHLEKKHGEDWGKVYDEAWERIDKKVEGLSKHIKLEEERRSEDAQSKAALTDWLRAKASFVIEGLKEADDKDEFCRCELKLQKWYGDLRGKPFAIEAENSILDISGFSKQYNCAFIWQKDGVKKLNLYLIINYFKGGKLRFKKIKPEAFEANRFYTVINKKSGEIVPMEVNFNFDDPNLIILPLAFGKRQGREFIWNDLLSLETGSLKLANGRVIEKTLYNRRTRQDEPALFVALTFERREVLDSSNIKPMNLIGVDRGENIPAVIALTDPEGCPLSRFKDSLGNPTHILRIGESYKEKQRTIQAKKEVEQRRAGGYSRKYASKAKNLADDMVRNTARDLLYYAVTQDAMLIFENLSRGFGRQGKRTFMAERQYTRMEDWLTAKLAYEGLPSKTYLSKTLAQYTSKTCSNCGFTITSADYDRVLEKLKKTATGWMTTINGKELKVEGQITYYNRYKRQNVVKDLSVELDRLSEESVNNDISSWDKGRSGEALSLLKKRFSHRPVQEKFVCLNCGFETHADEQAALNIARSWLFLRSQEYKKYQTNKTTGNTDKRAFVETWQSFYRKKLKEVWKPAV

SEQ ID NO: 49306 - protein, 979 aa, synthetic construct
  REGION 1..979: note = engineered CasX variant
QEIKRINKIRRRLVKDSNTKKAGKTGPMKTLLVRVMTPDLRERLENLRKKPENIPQPISNTSRANLNKLLTDYTEMKKAILHVYWEEFQKDPVGLMSRVAQPASKKIDQNKLKPEMDEKGNLTTAGFACSQCGQPLFVYKLEQVSEKGKAYTNYFGRCNVAEHEKLILLAQLKPEKDSDEAVTYSLGKFGQRALDFYSIHVTKESTHPVKPLAQIAGNRYASGPVGKALRDACMGTIASFLSKYQDIIIEHQKVVKGNQKRLESLRELAGKENLEYPSVTLPPQPHTKEGVDAYNEVIARVRMWVNLNLWQKLKLSRDDAKPLLRLKGFPSFPLVERQANEVDWWDMVCNVKKLINEKKEDGKVFWQNLAGYKRQEALRPYLSSEEDRKKGKKFARYQLGDLLLHLEKKHGEDWGKVYDEAWERIDKKVEGLSKHIKLEEERRSEDAQSKAALTDWLRAKASFVIEGLKEADKDEFCRCELKLQKWYGDLRGKPFAIEAENSILDISGFSKQYNCAFIWQKDGVKKLNLYLIINYFKGGKLRFKKIKPEAFEANRFYTVINKKSGEIVPMEVNFNFDDPNLIILPLAFGKRQGREFIWNDLLSLETGSLKLANGRVIEKTLYNRRTRQDEPALFVALTFERREVLDSSNIKPMNLIGVDRGENIPAVIALTDPEGCPLSRFKDSLGNPTHILRIGESYKEKQRTIQAKKEVEQRRAGGYSRKYASKAKNLADDMVRNTARDLLYYAVTQDAMLIFENLSRGFGRQGKRTFMAERQYTRMEDWLTAKLAYEGLPSKTYLSKTLAQYTSKTCSNCGFTITSADYDRVLEKLKKTATGWMTTINGKELKVEGQITYYNRYKRQNVVKDLSVELDRLSEESVNNDISSWDKGRSGNEALSLLKKRFSHRPVQEKFVCLNCGFETHADEQAALNIARSWLFLRSQEYKKYQTNKTTGNTDKRAFVETWQSFYRKKLKEVWKPAV

SEQ ID NO: 49307 - protein, 978 aa, synthetic construct
  REGION 1..978: note = engineered CasX variant
QEIKRINKIRRRLVKDSNTKKAGKTGPMKTLLVRVMTPDLRERLENLRKKPENIPQPISNTSRANLNKLLTDYTEMKKAILHVYWEEFQKDPVGLMSRVAQPASKKIDQNKLKPEMDEKGNLTTAGFACSQCGQPLFVYKLEQVSEKGKAYTNYFGRCNVAEHEKLILLAQLKPEKDSDEAVTYSLGKFGQRALDFYSIHVTKESTHPVKPLAQIAGNRYASGPVGKALRDACMGTIASFLSKYQDIIIEHQKVVKGNQKRLESLRELAGKENLEYPSVTLPPQPHTKEGVDAYNEVIARVRMWVNLNLWQKLKLSRDDAKPLLRLKGFPSFPLVERQANEVDWWDMVCNVKKLINEKKEDGKVFWQNLAGYKRQEALRPYLSSEEDRQKGKKFARYQLGDLLLHLEKKHGEDWGKVYDEAWERIDKKVEGLSKHIKLEEERRSEDAQSKAALTDWLRAKASFVIEGLKEADKDEFCRCELKLQKWYGDLRGKPFAIEAENSILDISGFSKQYNCAFIWQKDGVKKLNLYLIINYFKGGKLRFKKIKPEAFEANRFYTVINKKSGEIVPMEVNFNFDDPNLIILPLAFGKRQGREFIWNDLLSLETGSLKLANGRVIEKTLYNRRTRQDEPALFVALTFERREVLDSSNIKPMNLIGVDRGENIPAVIALTDPEGCPLSRFKDSLGNPTHILRIGESYKEKQRTIQAKKEVEQRRAGGYSRKYASKAKNLADDMVRNTARDLLYYAVTQDAMLIFENLSRGFGRQGKRTFMAERQYTRMEDWLTAKLAYEGLPSKTYLSKTLAQYTSKTCSNCGFTITSADYDRVLEKLKKTATGWMTTINGKELKVEGQITYYNRYKRQNVVKDLSVELDRLSEESVNNDISSWDKGRSGEALSLLKKRFSHRPVQEKFVCLNCGFETHADEQAALNIARSWLFLRSQEYKKYQTNKTTGNTDKRAFVETWQSFYRKKLKEVWKPAV

SEQ ID NO: 49308 - protein, 978 aa, synthetic construct
  REGION 1..978: note = engineered CasX variant
QEIKRINKIRRRLVKDSNTKKAGKTGPMKTLLVRVMTPDLRERLENLRKKPENIPQPISNTSRANLNKLLTDYTEMKKAILHVYWEEFQKDPVGLMSRVAQPASKKIDQNKLKPEMDEKGNLTTAGFACSQCGQPLFVYKLEQVSEKGKAYTNYFGRCNVAEHEKLILLAQLKPEKDSDEAVTYSLGKFGQRALDFYSIHVTKESTHPVKPLAQIAGNRYASGPVGKALRDACMGTIASFLSKYQDIIIEHQKVVKGNQKRLESLRELAGKENLEYPSVTLPPQPHTKEGVDAYNEVIARVRMWVNLNLWQKLKLSRDDAKPLLRLKGFPSFPLVERQANEVDWWDMVCNVKKLINEKKEDGKVFWQNLAGYKRQEALRPYLSSEEDRKKGKKFARYQLGDLLLHLEKKHGEDWGKVYDEAWERIDKKVEGLSKHIKLEEERRSEDAQSKAALTDWLRAKASFVIEGLKEADKDEFCRCELKLQKWYGDLRGKPFAIEAENSILDISGFSKQYNCAFIWQKDGVKKLNLYLIINYFKGGKLRFKKIKPEAFEANRFYTVINKKSGEIVPMEVNFNFDDPNLIILPLAFGKRQGREFIWNDLLSLETGSLKLANGRVIEKTLYNRRTRQDEPALFVALTFERREVLDSSNIKPMNLIGVDRGENIPAVIALTDPEGCPLSRFKDSLGNPTHILRIGESYKEKQRTIQAKKEVEQRRAGGYSRKYASKAKNLADDMVRNTARDLLYYAVTQDAMLIFENLSRGFGRQGKRTFMAERQYTRMEDWLTAKLAYEGLPSQTYLSKTLAQYTSKTCSNCGFTITSADYDRVLEKLKKTATGWMTTINGKELKVEGQITYYNRYKRQNVVKDLSVELDRLSEESVNNDISSWDKGRSGEALSLLKKRFSHRPVQEKFVCLNCGFETHADEQAALNIARSWLFLRSQEYKKYQTNKTTGNTDKRAFVETWQSFYRKKLKEVWKPAV

SEQ ID NO: 49309 - protein, 978 aa, synthetic construct
  REGION 1..978: note = engineered CasX variant
QEIKRINKIRRRLVKDSNTKKAGKTGPMKTLLVRVMTPDLRERLENLRKKPENIPQPISNTSRANLNKLLTDYTEMKKAILHVYWEEFQKDPVGLMSRVAQPASKKIDQNKLKPEMDEKGNLTTAGFACSQCGQPLFVYKLEQVSEKGKAYTNYFGRCNVAEHEKLILLAQLKPEKDSDEAVTYSLGKFGQRALDFYSIHVTKESTHPVKPLAQIAGNRYASGPVGKALRDACMGTIASFLSKYQDIIIEHQKVVKGNQKRLESLRELAGKENLEYPSVTLPPQPHTKEGVDAYNEVIARVRMWVNLNLWQKLKLSRDDAKPLLRLKGFPSFPLVERQANEVDWWDMVCNVKKLINEKKEDGKVFWQNLAGYKRQEALRPYLSSEEDRKKGKKFARYQLGDLLLHLEKKHGEDWGKVYDEAWERIDKKVEGLSKHIKLEEERRSEDAQSKAALTDWLRAKASFVIEGLKEADKDEFCRCELKLQKWYGDLRGKPFAIEAENSILDISGFSKQYNCAFIWQKDGVKKLNLYLIINYFKGGKLRFKKIKPEAFEANRFYTVINKKSGEIVPMEVNFNFDDPNLIILPLAFGKRQGREFIWNDLLSLETGSLKLANGRVIEKTLYNRRTRQDEPALFVALTFERREVLDSSNIKPMNLIGVDRGENIPAVIALTDPEGCPLSRFKDSLGNPTHILRIGESYKEKQRTIQAKKEVEQRRAGGYSRKYASKAKNLADDMVRNTARDLLYYAVTQDAMLIFENLSRGFGRQGKRTFMAERQYTRMEDWLTAKLAYNGLPSKTYLSKTLAQYTSKTCSNCGFTITSADYDRVLEKLKKTATGWMTTINGKELKVEGQITYYNRYKRQNVVKDLSVELDRLSEESVNNDISSWDKGRSGEALSLLKKRFSHRPVQEKFVCLNCGFETHADEQAALNIARSWLFLRSQEYKKYQTNKTTGNTDKRAFVETWQSFYRKKLKEVWKPAV

SEQ ID NO: 49310 - protein, 978 aa, synthetic construct
  REGION 1..978: note = engineered CasX variant
QEIKRINKIRRRLVKDSNTKKAGKTGPMKTLLVRVMTPDLRERLENLRKKPENIPQPISNTSRANLNKLLTDYTEMKKAILHVYWEEFQKDPVGLMSRVAQPASKKIDQNKLKPEMDEKGNLTTAGFACSQCGQPLFVYKLEQVSEKGKAYTNYFGRCNVAEHEKLIQLAQLKPEKDSDEAVTYSLGKFGQRALDFYSIHVTKESTHPVKPLAQIAGNRYASGPVGKALRDACMGTIASFLSKYQDIIIEHQKVVKGNQKRLESLRELAGKENLEYPSVTLPPQPHTKEGVDAYNEVIARVRMWVNLNLWQKLKLSRDDAKPLLRLKGFPSFPLVERQANEVDWWDMVCNVKKLINEKKEDGKVFWQNLAGYKRQEALRPYLSSEEDRKKGKKFARYQLGDLLLHLEKKHGEDWGKVYDEAWERIDKKVEGLSKHIKLEEERRSEDAQSKAALTDWLRAKASFVIEGLKEADKDEFCRCELKLQKWYGDLRGKPFAIEAENSILDISGFSKQYNCAFIWQKDGVKKLNLYLIINYFKGGKLRFKKIKPEAFEANRFYTVINKKSGEIVPMEVNFNFDDPNLIILPLAFGKRQGREFIWNDLLSLETGSLKLANGRVIEKTLYNRRTRQDEPALFVALTFERREVLDSSNIKPMNLIGVDRGENIPAVIALTDPEGCPLSRFKDSLGNPTHILRIGESYKEKQRTIQAKKEVEQRRAGGYSRKYASKAKNLADDMVRNTARDLLYYAVTQDAMLIFENLSRGFGRQGKRTFMAERQYTRMEDWLTAKLAYEGLPSKTYLSKTLAQYTSKTCSNCGFTITSADYDRVLEKLKKTATGWMTTINGKELKVEGQITYYNRYKRQNVVKDLSVELDRLSEESVNNDISSWDKGRSGEALSLLKKRFSHRPVQEKFVCLNCGFETHADEQAALNIARSWLFLRSQEYKKYQTNKTTGNTDKRAFVETWQSFYRKKLKEVWKPAV

SEQ ID NO: 49311 - protein, 978 aa, synthetic construct
  REGION 1..978: note = engineered CasX variant
QEIKRINKIRRRLVKDSNTKKAGKTGPMKTLLVRVMTPDLRERLENLRKKPENIPQPISNTSRANLNKLLTDYTEMKKAILHVYWEEFQKDPVGLMSRVAQPASKKIDQNKLKPEMDEKGNLTTAGFACSQCGQPLFVYKLEQVSEKGKAYTNYFGRCNVAEHEKLILLAQLKPEKDSDEAVTYSLGKFGQRALDFYSIHVTKESTHPVKPLAQIAGNRYASGPVGKALRDACMGTIASFLSKYQDIIIEHQKVVKGNQKRLESLRELAGKENLEYPSVTLPPQPHTKEGVDAYNEVIARVRMWVNLNLWQKLKLSRDDAKPLLRLKGFPSFPLVERQANEVDWWDMVCNVKKLINEKKEDGKVFWQNLAIYKRQEALRPYLSSEEDRKKGKKFARYQLGDLLLHLEKKHGEDWGKVYDEAWERIDKKVEGLSKHIKLEEERRSEDAQSKAALTDWLRAKASFVIEGLKEADKDEFCRCELKLQKWYGDLRGKPFAIEAENSILDISGFSKQYNCAFIWQKDGVKKLNLYLIINYFKGGKLRFKKIKPEAFEANRFYTVINKKSGEIVPMEVNFNFDDPNLIILPLAFGKRQGREFIWNDLLSLETGSLKLANGRVIEKTLYNRRTRQDEPALFVALTFERREVLDSSNIKPMNLIGVDRGENIPAVIALTDPEGCPLSRFKDSLGNPTHILRIGESYKEKQRTIQAKKEVEQRRAGGYSRKYASKAKNLADDMVRNTARDLLYYAVTQDAMLIFENLSRGFGRQGKRTFMAERQYTRMEDWLTAKLAYEGLPSKTYLSKTLAQYTSKTCSNCGFTITSADYDRVLEKLKKTATGWMTTINGKELKVEGQITYYNRYKRQNVVKDLSVELDRLSEESVNNDISSWDKGRSGEALSLLKKRFSHRPVQEKFVCLNCGFETHADEQAALNIARSWLFLRSQEYKKYQTNKTTGNTDKRAFVETWQSFYRKKLKEVWKPAV

SEQ ID NO: 49312 - protein, 978 aa, synthetic construct
  REGION 1..978: note = engineered CasX variant
QEIKRINKIRRRLVKDSNTKKAGKTGPMKTLLVRVMTPDLRERLENLRKKPENIPQPISNTSRANLNKLLTDYTEMKKAILHVYWEEFQKDPVGLMSRVAQPASKKIDQNKLKPEMDEKGNLTTAGFACSQCGQPLFVYKLEQVSEKGKAYTNYFGRCNVAEHEKLILLAQLKPEKDSDEAVTYSLGKFGQRALDFYSIHVTKESTHPVKPLAQIAGNRYASGPVGKALRDACMGTIASFLSKYQDIIIEHQKVVKGNQKRLESLRELAGKENLEYPSVTLPPQPHTKEGVDAYNEVIARVRMWVNLNLWQKLKLSRDDAKPLLRLKGFPSFPLVERQANEVDWWDMVCNVKKLINEKKEDGKVFWQNLAGYKRQEALRPYLSSEEDREKGKKFARYQLGDLLLHLEKKHGEDWGKVYDEAWERIDKKVEGLSKHIKLEEERRSEDAQSKAALTDWLRAKASFVIEGLKEADKDEFCRCELKLQKWYGDLRGKPFAIEAENSILDISGFSKQYNCAFIWQKDGVKKLNLYLIINYFKGGKLRFKKIKPEAFEANRFYTVINKKSGEIVPMEVNFNFDDPNLIILPLAFGKRQGREFIWNDLLSLETGSLKLANGRVIEKTLYNRRTRQDEPALFVALTFERREVLDSSNIKPMNLIGVDRGENIPAVIALTDPEGCPLSRFKDSLGNPTHILRIGESYKEKQRTIQAKKEVEQRRAGGYSRKYASKAKNLADDMVRNTARDLLYYAVTQDAMLIFENLSRGFGRQGKRTFMAERQYTRMEDWLTAKLAYEGLPSKTYLSKTLAQYTSKTCSNCGFTITSADYDRVLEKLKKTATGWMTTINGKELKVEGQITYYNRYKRQNVVKDLSVELDRLSEESVNNDISSWDKGRSGEALSLLKKRFSHRPVQEKFVCLNCGFETHADEQAALNIARSWLFLRSQEYKKYQTNKTTGNTDKRAFVETWQSFYRKKLKEVWKPAV

SEQ ID NO: 49313 - protein, 978 aa, synthetic construct
  REGION 1..978: note = engineered CasX variant
QEIKRINKIRRRLVKDSNTKKAGKTGPMKTLLVRVMTPDLRERLENLRKKPENIPQPISNTSRANLNKLLTDYTEMKKAILHVYWEEFQKDPVGLMSRVAQPASKKIDQNKLKPEMDEKGNLTTAGFACSQCGQPLFVYKLEQVSEKGKAYTNYFGRCNVAEHEKLILLAQLKPEKDSDEAVTYSLGKFGQRALDFYSIHVTKESTHPVKPLAQIAGNRYASGPVGKALRDACMGTIASFLSKYQDIIIEHQKVVKGNQKRLESLRELAGKENLEYPSVTLPPQPHTKEGVDAYNEVIARVRMWVNLNLWQKLKLSRDDAKPLLRLKGFPSFPLVERQANEVDWWDMVCNVKKLINEKKEDGKVFWQNLAGYKRQEALRPYLSSEEDRKKGKKFARYQLGDLLLHLEKKHGEDWGKVYDEAWERIDKKVEGLSKHIKLEEERRSEDAQSKAALTDWLRAKASFVIEGLKEADKDEFCRCELKLQKWYGDLRGKPFAIEAENSILDISGFSKQYNCAFIWQKDGVKKLNLYLIINYFKGGKLRFKKIKPEAFEANRFYTVINKKSGEIVIMEVNFNFDDPNLIILPLAFGKRQGREFIWNDLLSLETGSLKLANGRVIEKTLYNRRTRQDEPALFVALTFERREVLDSSNIKPMNLIGVDRGENIPAVIALTDPEGCPLSRFKDSLGNPTHILRIGESYKEKQRTIQAKKEVEQRRAGGYSRKYASKAKNLADDMVRNTARDLLYYAVTQDAMLIFENLSRGFGRQGKRTFMAERQYTRMEDWLTAKLAYEGLPSKTYLSKTLAQYTSKTCSNCGFTITSADYDRVLEKLKKTATGWMTTINGKELKVEGQITYYNRYKRQNVVKDLSVELDRLSEESVNNDISSWDKGRSGEALSLLKKRFSHRPVQEKFVCLNCGFETHADEQAALNIARSWLFLRSQEYKKYQTNKTTGNTDKRAFVETWQSFYRKKLKEVWKPAV

SEQ ID NO: 49314 - protein, 978 aa, synthetic construct
  REGION 1..978: note = engineered CasX variant
QEIKRINKIRRRLVKDSNTKKAGKTGPMKTLLVRVMTPDLRERLENLRKKPENIPQPISNTSRANLNKLLTDYTEMKKAILHVYWEEFQVDPVGLMSRVAQPASKKIDQNKLKPEMDEKGNLTTAGFACSQCGQPLFVYKLEQVSEKGKAYTNYFGRCNVAEHEKLILLAQLKPEKDSDEAVTYSLGKFGQRALDFYSIHVTKESTHPVKPLAQIAGNRYASGPVGKALRGACMGTIASFLSKYQDIIIEHQKVVKGNQKRLESLRELAGKENLEYPSVTLPPQPHTKEGVDAYNEVIARVRMWVNLNLWQKLKLSRDDAKPLLRLKGFPSFPLVERQANEVDWWDMVCNVKKLINEKKEDGKVFWQNLAGYKRQEALRPYLSSEEDRKKGKKFARYQLGDLLLHLEKKHGEDWGKVYDEAWERIDKKVEGLSKHIKLEEERRSEDAQSKAALTDWLRAKASFVIEGLKEADKDEFCRCELKLQKWYGDLRGKPFAIEAENSILDISGFSKQYNCAFIWQKDGVKKLNLYLIINYFKGGKLRFKKIKPEAFEANRFYTVINKKSGEIVPMEVNFNFDDPNLIILPLAFGKRQGREFIWNDLLSLETGSLKLANGRVIEKTLYNRRTRQDEPALFVALTFERREVLDSSNIKPMNLIGVDRGENIPAVIALTDPEGCPLSRFKDSLGNPTHILRIGESYKEKQRTIQAKKEVEQRRAGGYSRKYASKAKNLADDMVRNTARDLLYYAVTQDAMLIFENLSRGFGRQGKRTFMAERQYTRMEDWLTAKLAYEGLPSKTYLSKTLAQYTSKTCSNCGFTITSADYDRVLEKLKKTATGWMTTINGKELKVEGQITYYNRYKRQNVVKDLSVELDRLSEESVNNDISSWTKGRSGEALSLLKKRFSHRPVQEKFVCLNCGFETHADEQAALNIARSWLFLRSQEYKKYQTNKTTGNTDKRAFVETWQSFYRKKLKEVWKPAV

SEQ ID NO: 49315 - protein, 978 aa, synthetic construct
  REGION 1..978: note = engineered CasX variant
QEIKRINKIRRRLVKDSNTKKAGKTGPMKTLLVRVMTPDLRERLENLRKKPENIPQPISNTSRANLNKLLTDYTEMKKAILHVYWEEFQVDPVGLMSRVAQPASKKIDQNKLKPEMDEKGNLTTAGFACSQCGQPLFVYKLEQVSEKGKAYTNYFGRCNVAEHEKLILLAQLKPEKDSDEAVTYSLGKFGQRALDFYSIHVTKESTHPVKPLAQIAGNRYASGPVGKALRDACMGTIASFLSKYQDIIIEHQKVVKGNQKRLESLRELAGKENLEYPSVTLPPQPHTKEGVDAYNEVIARVRMWVNLNLWQKLKLSRDDAKPLLRLKNFPSFPLVERQANEVDWWDMVCNVKKLINEKKEDGKVFWQNLAGYKRQEALRPYLSSEEDRKKGKKFARYQLGDLLLHLEKKHGEDWGKVYDEAWERIDKKVEGLSKHIKLEEERRSEDAQSKAALTDWLRAKASFVIEGLKEADKDEFCRCELKLQKWYGDLRGKPFAIEAENSILDISGFSKQYNCAFIWQKDGVKKLNLYLIINYFKGGKLRFKKIKPEAFEANRFYTVINKKSGEIVPMEVNFNFDDPNLIILPLAFGKRQGREFIWNDLLSLETGSLKLANGRVIEKTLYNRRTRQDEPALFVALTFERREVLDSSNIKPMNLIGVDRGENIPAVIALTDPEGCPLSRFKDSLGNPTHILRIGESYKEKQRTIQAKKEVEQRRAGGYSRKYASKAKNLADDMVRNTARDLLYYAVTQDAMLIFENLSRGFGRQGKRTFMAERQYTRMEDWLTAKLAYEGLPSKTYLSKTLAQYTSKTCSNCGFTITSADYDRVLEKLKKTATGWMTTINGKELKVEGQITYYNRYKRQNVVKDLSVELDRLSEESVNNDISSWTKGRSGEALSLLKKRFSHRPVQEKFVCLNCGFETHADEQAALNIARSWLFLRSQEYKKYQTNKTTGNTDKRAFVETWQSFYRKKLKEVWKPAV

SEQ ID NO: 49316 - protein, 978 aa, synthetic construct
  REGION 1..978: note = engineered CasX variant
QEIKRINKIRRRLVKDSNTKKAGKTGPMKTLLVRVMTPDLRERLENLRKKPENIPQPISNTSRANLNKLLTDYTEMKKAILHVYWEEFQVDPVGLMSRVAQPASKKIDQNKLKPEMDEKGNLTTAGFACSQCGQPLFVYKLEQVSEKGKAYTNYFGRCNVAEHEKLILLAQLKPEKDSDEAVTYSLGKFGQRALDFYSIHVTKESTHPVKPLAQIAGNRYASGPVGKALRDACMGTIASFLSKYQDIIIEHQKVVKGNQKRLESLRELAGKENLEYPSVTLPPQPHTKEGVDAYNEVIARVRMWVNLNLWQKLKLSRDDAKPLLRLKGFPSFPLVERQANEVDWWDMVCNVKKLINEKKEDGKVFWQNLAGYKRQEALRPYLSSEEDRKKGKKFARYQLGDLLNHLEKKHGEDWGKVYDEAWERIDKKVEGLSKHIKLEEERRSEDAQSKAALTDWLRAKASFVIEGLKEADKDEFCRCELKLQKWYGDLRGKPFAIEAENSILDISGFSKQYNCAFIWQKDGVKKLNLYLIINYFKGGKLRFKKIKPEAFEANRFYTVINKKSGEIVPMEVNFNFDDPNLIILPLAFGKRQGREFIWNDLLSLETGSLKLANGRVIEKTLYNRRTRQDEPALFVALTFERREVLDSSNIKPMNLIGVDRGENIPAVIALTDPEGCPLSRFKDSLGNPTHILRIGESYKEKQRTIQAKKEVEQRRAGGYSRKYASKAKNLADDMVRNTARDLLYYAVTQDAMLIFENLSRGFGRQGKRTFMAERQYTRMEDWLTAKLAYEGLPSKTYLSKTLAQYTSKTCSNCGFTITSADYDRVLEKLKKTATGWMTTINGKELKVEGQITYYNRYKRQNVVKDLSVELDRLSEESVNNDISSWTKGRSGEALSLLKKRFSHRPVQEKFVCLNCGFETHADEQAALNIARSWLFLRSQEYKKYQTNKTTGNTDKRAFVETWQSFYRKKLKEVWKPAV

SEQ ID NO: 49317 - protein, 978 aa, synthetic construct
  REGION 1..978: note = engineered CasX variant
QEIKRINKIRRRLVKDSNTKKAGKTGPMKTLLVRVMTPDLRERLENLRKKPENIPQPISNTSRANLNKLLTDYTEMKKAILHVYWEEFQVDPVGLMSRVAQPASKKIDQNKLKPEMDEKGNLTTAGFACSQCGQPLFVYKLEQVSEKGKAYTNYFGRCNVAEHEKLILLAQLKPEKDSDEAVTYSLGKFGQRALDFYSIHVTKESTHPVKPLAQIAGNRYASGPVGKALRDACMGTIASFLSKYQDIIIEHQKVVKGNQKRLESLRELAGKENLEYPSVTLPPQPHTKEGVDAYNEVIARVRMWVNLNLWQKLKLSRDDAKPLLRLKGFPSFPLVERQANEVDWWDMVCNVKKLINEKKEDGKVFWQNLAGYKRQEALRPYLSSEEDRKKGKKFARYQLGDLLWHLEKKHGEDWGKVYDEAWERIDKKVEGLSKHIKLEEERRSEDAQSKAALTDWLRAKASFVIEGLKEADKDEFCRCELKLQKWYGDLRGKPFAIEAENSILDISGFSKQYNCAFIWQKDGVKKLNLYLIINYFKGGKLRFKKIKPEAFEANRFYTVINKKSGEIVPMEVNFNFDDPNLIILPLAFGKRQGREFIWNDLLSLETGSLKLANGRVIEKTLYNRRTRQDEPALFVALTFERREVLDSSNIKPMNLIGVDRGENIPAVIALTDPEGCPLSRFKDSLGNPTHILRIGESYKEKQRTIQAKKEVEQRRAGGYSRKYASKAKNLADDMVRNTARDLLYYAVTQDAMLIFENLSRGFGRQGKRTFMAERQYTRMEDWLTAKLAYEGLPSKTYLSKTLAQYTSKTCSNCGFTITSADYDRVLEKLKKTATGWMTTINGKELKVEGQITYYNRYKRQNVVKDLSVELDRLSEESVNNDISSWTKGRSGEALSLLKKRFSHRPVQEKFVCLNCGFETHADEQAALNIARSWLFLRSQEYKKYQTNKTTGNTDKRAFVETWQSFYRKKLKEVWKPAV

SEQ ID NO: 49318 - protein, 978 aa, synthetic construct
  REGION 1..978: note = engineered CasX variant
QEIKRINKIRRRLVKDSNTKKAGKTGPMKTLLVRVMTPDLRERLENLRKKPENIPQPISNTSRANLNKLLTDYTEMKKAILHVYWEEFQVDPVGLMSRVAQPASKKIDQNKLKPEMDEKGNLTTAGFACSQCGQPLFVYKLEQVSEKGKAYTNYFGRCNVAEHEKLILLAQLKPEKDSDEAVTYSLGKFGQRALDFYSIHVTKESTHPVKPLAQIAGNRYASGPVGKALRDACMGTIASFLSKYQDIIIEHQKVVKGNQKRLESLRELAGKENLEYPSVTLPPQPHTKEGVDAYNEVIARVRMWVNLNLWQKLKLSRDDAKPLLRLKGFPSFPLVERQANEVDWWDMVCNVKKLINEKKEDGKVFWQNLAGYKRQEALRPYLSSEEDRKKGKKFARYQLGDLLLHLYKKHGEDWGKVYDEAWERIDKKVEGLSKHIKLEEERRSEDAQSKAALTDWLRAKASFVIEGLKEADKDEFCRCELKLQKWYGDLRGKPFAIEAENSILDISGFSKQYNCAFIWQKDGVKKLNLYLIINYFKGGKLRFKKIKPEAFEANRFYTVINKKSGEIVPMEVNFNFDDPNLIILPLAFGKRQGREFIWNDLLSLETGSLKLANGRVIEKTLYNRRTRQDEPALFVALTFERREVLDSSNIKPMNLIGVDRGENIPAVIALTDPEGCPLSRFKDSLGNPTHILRIGESYKEKQRTIQAKKEVEQRRAGGYSRKYASKAKNLADDMVRNTARDLLYYAVTQDAMLIFENLSRGFGRQGKRTFMAERQYTRMEDWLTAKLAYEGLPSKTYLSKTLAQYTSKTCSNCGFTITSADYDRVLEKLKKTATGWMTTINGKELKVEGQITYYNRYKRQNVVKDLSVELDRLSEESVNNDISSWTKGRSGEALSLLKKRFSHRPVQEKFVCLNCGFETHADEQAALNIARSWLFLRSQEYKKYQTNKTTGNTDKRAFVETWQSFYRKKLKEVWKPAV

SEQ ID NO: 49319 - protein, 978 aa, synthetic construct
  REGION 1..978: note = engineered CasX variant
QEIKRINKIRRRLVKDSNTKKAGKTGPMKTLLVRVMTPDLRERLENLRKKPENIPQPISNTSRANLNKLLTDYTEMKKAILHVYWEEFQVDPVGLMSRVAQPASKKIDQNKLKPEMDEKGNLTTAGFACSQCGQPLFVYKLEQVSEKGKAYTNYFGRCNVAEHEKLILLAQLKPEKDSDEAVTYSLGKFGQRALDFYSIHVTKESTHPVKPLAQIAGNRYASGPVGKALRDACMGTIASFLSKYQDIIIEHQKVVKGNQKRLESLRELAGKENLEYPSVTLPPQPHTKEGVDAYNEVIARVRMWVNLNLWQKLKLSRDDAKPLLRLKGFPSFPLVERQANEVDWWDMVCNVKKLINEKKEDGKVFWQNLAGYKRQEALRPYLSSEEDRKKGKKFARYQLGDLLLHLEKKHPEDWGKVYDEAWERIDKKVEGLSKHIKLEEERRSEDAQSKAALTDWLRAKASFVIEGLKEADKDEFCRCELKLQKWYGDLRGKPFAIEAENSILDISGFSKQYNCAFIWQKDGVKKLNLYLIINYFKGGKLRFKKIKPEAFEANRFYTVINKKSGEIVPMEVNFNFDDPNLIILPLAFGKRQGREFIWNDLLSLETGSLKLANGRVIEKTLYNRRTRQDEPALFVALTFERREVLDSSNIKPMNLIGVDRGENIPAVIALTDPEGCPLSRFKDSLGNPTHILRIGESYKEKQRTIQAKKEVEQRRAGGYSRKYASKAKNLADDMVRNTARDLLYYAVTQDAMLIFENLSRGFGRQGKRTFMAERQYTRMEDWLTAKLAYEGLPSKTYLSKTLAQYTSKTCSNCGFTITSADYDRVLEKLKKTATGWMTTINGKELKVEGQITYYNRYKRQNVVKDLSVELDRLSEESVNNDISSWTKGRSGEALSLLKKRFSHRPVQEKFVCLNCGFETHADEQAALNIARSWLFLRSQEYKKYQTNKTTGNTDKRAFVETWQSFYRKKLKEVWKPAV

SEQ ID NO: 49320 - protein, 979 aa, synthetic construct
  REGION 1..979: note = engineered CasX variant
QEIKRINKIRRRLVKDSNTKKAGKTGPMKTLLVRVMTPDLRERLENLRKKPENIPQPISNTSRANLNKLLTDYTEMKKAILHVYWEEFQVDPVGLMSRVAQPASKKIDQNKLKPEMDEKGNLTTAGFACSQCGQPLFVYKLEQVSEKGKAYTNYFGRCNVAEHEKLILLAQLKPEKDSDEAVTYSLGKFGQRALDFYSIHVTKESTHPVKPLAQIAGNRYASGPVGKALRDACMGTIASFLSKYQDIIIEHQKVVKGNQKRLESLRELAGKENLEYPSVTLPPQPHTKEGVDAYNEVIARVRMWVNLNLWQKLKLSRDDAKPLLRLKGFPSFPLVERQANEVDWWDMVCNVKKLINEKKEDGKVFWQNLAGYKRQEALRPYLSSEEDRKKGKKFARYQLGDLLLHLEKKHGERDWGKVYDEAWERIDKKVEGLSKHIKLEEERRSEDAQSKAALTDWLRAKASFVIEGLKEADKDEFCRCELKLQKWYGDLRGKPFAIEAENSILDISGFSKQYNCAFIWQKDGVKKLNLYLIINYFKGGKLRFKKIKPEAFEANRFYTVINKKSGEIVPMEVNFNFDDPNLIILPLAFGKRQGREFIWNDLLSLETGSLKLANGRVIEKTLYNRRTRQDEPALFVALTFERREVLDSSNIKPMNLIGVDRGENIPAVIALTDPEGCPLSRFKDSLGNPTHILRIGESYKEKQRTIQAKKEVEQRRAGGYSRKYASKAKNLADDMVRNTARDLLYYAVTQDAMLIFENLSRGFGRQGKRTFMAERQYTRMEDWLTAKLAYEGLPSKTYLSKTLAQYTSKTCSNCGFTITSADYDRVLEKLKKTATGWMTTINGKELKVEGQITYYNRYKRQNVVKDLSVELDRLSEESVNNDISSWTKGRSGEALSLLKKRFSHRPVQEKFVCLNCGFETHADEQAALNIARSWLFLRSQEYKKYQTNKTTGNTDKRAFVETWQSFYRKKLKEVWKPAV

SEQ ID NO: 49321 - protein, 979 aa, synthetic construct
  REGION 1..979: note = engineered CasX variant
QEIKRINKIRRRLVKDSNTKKAGKTGPMKTLLVRVMTPDLRERLENLRKKPENIPQPISNTSRANLNKLLTDYTEMKKAILHVYWEEFQVDPVGLMSRVAQPASKKIDQNKLKPEMDEKGNLTTAGFACSQCGQPLFVYKLEQVSEKGKAYTNYFGRCNVAEHEKLILLAQLKPEKDSDEAVTYSLGKFGQRALDFYSIHVTKESTHPVKPLAQIAGNRYASGPVGKALRDACMGTIASFLSKYQDIIIEHQKVVKGNQKRLESLRELAGKENLEYPSVTLPPQPHTKEGVDAYNEVIARVRMWVNLNLWQKLKLSRDDAKPLLRLKGFPSFPLVERQANEVDWWDMVCNVKKLINEKKEDGKVFWQNLAGYKRQEALRPYLSSEEDRKKGKKFARYQLGDLLLHLEKKHGEYDWGKVYDEAWERIDKKVEGLSKHIKLEEERRSEDAQSKAALTDWLRAKASFVIEGLKEADKDEFCRCELKLQKWYGDLRGKPFAIEAENSILDISGFSKQYNCAFIWQKDGVKKLNLYLIINYFKGGKLRFKKIKPEAFEANRFYTVINKKSGEIVPMEVNFNFDDPNLIILPLAFGKRQGREFIWNDLLSLETGSLKLANGRVIEKTLYNRRTRQDEPALFVALTFERREVLDSSNIKPMNLIGVDRGENIPAVIALTDPEGCPLSRFKDSLGNPTHILRIGESYKEKQRTIQAKKEVEQRRAGGYSRKYASKAKNLADDMVRNTARDLLYYAVTQDAMLIFENLSRGFGRQGKRTFMAERQYTRMEDWLTAKLAYEGLPSKTYLSKTLAQYTSKTCSNCGFTITSADYDRVLEKLKKTATGWMTTINGKELKVEGQITYYNRYKRQNVVKDLSVELDRLSEESVNNDISSWTKGRSGEALSLLKKRFSHRPVQEKFVCLNCGFETHADEQAALNIARSWLFLRSQEYKKYQTNKTTGNTDKRAFVETWQSFYRKKLKEVWKPAV

SEQ ID NO: 49322 - protein, 978 aa, synthetic construct
  REGION 1..978: note = engineered CasX variant
QEIKRINKIRRRLVKDSNTKKAGKTGPMKTLLVRVMTPDLRERLENLRKKPENIPQPISNTSRANLNKLLTDYTEMKKAILHVYWEEFQVDPVGLMSRVAQPASKKIDQNKLKPEMDEKGNLTTAGFACSQCGQPLFVYKLEQVSEKGKAYTNYFGRCNVAEHEKLILLAQLKPEKDSDEAVTYSLGKFGQRALDFYSIHVTKESTHPVKPLAQIAGNRYASGPVGKALRDACMGTIASFLSKYQDIIIEHQKVVKGNQKRLESLRELAGKENLEYPSVTLPPQPHTKEGVDAYNEVIARVRMWVNLNLWQKLKLSRDDAKPLLRLKGFPSFPLVERQANEVDWWDMVCNVKKLINEKKEDGKVFWQNLAGYKRQEALRPYLSSEEDRKKGKKFARYQLGDLLLHLEKKHGEDWGDVYDEAWERIDKKVEGLSKHIKLEEERRSEDAQSKAALTDWLRAKASFVIEGLKEADKDEFCRCELKLQKWYGDLRGKPFAIEAENSILDISGFSKQYNCAFIWQKDGVKKLNLYLIINYFKGGKLRFKKIKPEAFEANRFYTVINKKSGEIVPMEVNFNFDDPNLIILPLAFGKRQGREFIWNDLLSLETGSLKLANGRVIEKTLYNRRTRQDEPALFVALTFERREVLDSSNIKPMNLIGVDRGENIPAVIALTDPEGCPLSRFKDSLGNPTHILRIGESYKEKQRTIQAKKEVEQRRAGGYSRKYASKAKNLADDMVRNTARDLLYYAVTQDAMLIFENLSRGFGRQGKRTFMAERQYTRMEDWLTAKLAYEGLPSKTYLSKTLAQYTSKTCSNCGFTITSADYDRVLEKLKKTATGWMTTINGKELKVEGQITYYNRYKRQNVVKDLSVELDRLSEESVNNDISSWTKGRSGEALSLLKKRFSHRPVQEKFVCLNCGFETHADEQAALNIARSWLFLRSQEYKKYQTNKTTGNTDKRAFVETWQSFYRKKLKEVWKPAV

SEQ ID NO: 49323 - protein, 978 aa, synthetic construct
  REGION 1..978: note = engineered CasX variant
QEIKRINKIRRRLVKDSNTKKAGKTGPMKTLLVRVMTPDLRERLENLRKKPENIPQPISNTSRANLNKLLTDYTEMKKAILHVYWEEFQVDPVGLMSRVAQPASKKIDQNKLKPEMDEKGNLTTAGFACSQCGQPLFVYKLEQVSEKGKAYTNYFGRCNVAEHEKLILLAQLKPEKDSDEAVTYSLGKFGQRALDFYSIHVTKESTHPVKPLAQIAGNRYASGPVGKALRDACMGTIASFLSKYQDIIIEHQKVVKGNQKRLESLRELAGKENLEYPSVTLPPQPHTKEGVDAYNEVIARVRMWVNLNLWQKLKLSRDDAKPLLRLKGFPSFPLVERQANEVDWWDMVCNVKKLINEKKEDGKVFWQNLAGYKRQEALRPYLSSEEDRKKGKKFARYQLGDLLLHLEKKHGEDWGKVYGEAWERIDKKVEGLSKHIKLEEERRSEDAQSKAALTDWLRAKASFVIEGLKEADKDEFCRCELKLQKWYGDLRGKPFAIEAENSILDISGFSKQYNCAFIWQKDGVKKLNLYLIINYFKGGKLRFKKIKPEAFEANRFYTVINKKSGEIVPMEVNFNFDDPNLIILPLAFGKRQGREFIWNDLLSLETGSLKLANGRVIEKTLYNRRTRQDEPALFVALTFERREVLDSSNIKPMNLIGVDRGENIPAVIALTDPEGCPLSRFKDSLGNPTHILRIGESYKEKQRTIQAKKEVEQRRAGGYSRKYASKAKNLADDMVRNTARDLLYYAVTQDAMLIFENLSRGFGRQGKRTFMAERQYTRMEDWLTAKLAYEGLPSKTYLSKTLAQYTSKTCSNCGFTITSADYDRVLEKLKKTATGWMTTINGKELKVEGQITYYNRYKRQNVVKDLSVELDRLSEESVNNDISSWTKGRSGEALSLLKKRFSHRPVQEKFVCLNCGFETHADEQAALNIARSWLFLRSQEYKKYQTNKTTGNTDKRAFVETWQSFYRKKLKEVWKPAV

SEQ ID NO: 49324 - protein, 978 aa, synthetic construct
  REGION 1..978: note = engineered CasX variant
QEIKRINKIRRRLVKDSNTKKAGKTGPMKTLLVRVMTPDLRERLENLRKKPENIPQPISNTSRANLNKLLTDYTEMKKAILHVYWEEFQVDPVGLMSRVAQPASKKIDQNKLKPEMDEKGNLTTAGFACSQCGQPLFVYKLEQVSEKGKAYTNYFGRCNVAEHEKLILLAQLKPEKDSDEAVTYSLGKFGQRALDFYSIHVTKESTHPVKPLAQIAGNRYASGPVGKALRDACMGTIASFLSKYQDIIIEHQKVVKGNQKRLESLRELAGKENLEYPSVTLPPQPHTKEGVDAYNEVIARVRMWVNLNLWQKLKLSRDDAKPLLRLKGFPSFPLVERQANEVDWWDMVCNVKKLINEKKEDGKVFWQNLAGYKRQEALRPYLSSEEDRKKGKKFARYQLGDLLLHLEKKHGEDWGKVYDEAWERIDKKVEGLSKHIKLEEERRSEDAQSKAALTDWLRAKASFVIEGKKEADKDEFCRCELKLQKWYGDLRGKPFAIEAENSILDISGFSKQYNCAFIWQKDGVKKLNLYLIINYFKGGKLRFKKIKPEAFEANRFYTVINKKSGEIVPMEVNFNFDDPNLIILPLAFGKRQGREFIWNDLLSLETGSLKLANGRVIEKTLYNRRTRQDEPALFVALTFERREVLDSSNIKPMNLIGVDRGENIPAVIALTDPEGCPLSRFKDSLGNPTHILRIGESYKEKQRTIQAKKEVEQRRAGGYSRKYASKAKNLADDMVRNTARDLLYYAVTQDAMLIFENLSRGFGRQGKRTFMAERQYTRMEDWLTAKLAYEGLPSKTYLSKTLAQYTSKTCSNCGFTITSADYDRVLEKLKKTATGWMTTINGKELKVEGQITYYNRYKRQNVVKDLSVELDRLSEESVNNDISSWTKGRSGEALSLLKKRFSHRPVQEKFVCLNCGFETHADEQAALNIARSWLFLRSQEYKKYQTNKTTGNTDKRAFVETWQSFYRKKLKEVWKPAV

SEQ ID NO: 49325 - protein, 978 aa, synthetic construct
  REGION 1..978: note = engineered CasX variant
QEIKRINKIRRRLVKDSNTKKAGKTGPMKTLLVRVMTPDLRERLENLRKKPENIPQPISNTSRANLNKLLTDYTEMKKAILHVYWEEFQVDPVGLMSRVAQPASKKIDQNKLKPEMDEKGNLTTAGFACSQCGQPLFVYKLEQVSEKGKAYTNYFGRCNVAEHEKLILLAQLKPEKDSDEAVTYSLGKFGQRALDFYSIHVTKESTHPVKPLAQIAGNRYASGPVGKALRDACMGTIASFLSKYQDIIIEHQKVVKGNQKRLESLRELAGKENLEYPSVTLPPQPHTKEGVDAYNEVIARVRMWVNLNLWQKLKLSRDDAKPLLRLKGFPSFPLVERQANEVDWWDMVCNVKKLINEKKEDGKVFWQNLAGYKRQEALRPYLSSEEDRKKGKKFARYQLGDLLLHLEKKHGEDWGKVYDEAWERIDKKVEGLSKHIKLEEERRSEDAQSKAALTDWLRAKASFVIEGSKEADKDEFCRCELKLQKWYGDLRGKPFAIEAENSILDISGFSKQYNCAFIWQKDGVKKLNLYLIINYFKGGKLRFKKIKPEAFEANRFYTVINKKSGEIVPMEVNFNFDDPNLIILPLAFGKRQGREFIWNDLLSLETGSLKLANGRVIEKTLYNRRTRQDEPALFVALTFERREVLDSSNIKPMNLIGVDRGENIPAVIALTDPEGCPLSRFKDSLGNPTHILRIGESYKEKQRTIQAKKEVEQRRAGGYSRKYASKAKNLADDMVRNTARDLLYYAVTQDAMLIFENLSRGFGRQGKRTFMAERQYTRMEDWLTAKLAYEGLPSKTYLSKTLAQYTSKTCSNCGFTITSADYDRVLEKLKKTATGWMTTINGKELKVEGQITYYNRYKRQNVVKDLSVELDRLSEESVNNDISSWTKGRSGEALSLLKKRFSHRPVQEKFVCLNCGFETHADEQAALNIARSWLFLRSQEYKKYQTNKTTGNTDKRAFVETWQSFYRKKLKEVWKPAV

SEQ ID NO: 49326 - protein, 979 aa, synthetic construct
  REGION 1..979: note = engineered CasX variant
QEIKRINKIRRRLVKDSNTKKAGKTGPMKTLLVRVMTPDLRERLENLRKKPENIPQPISNTSRANLNKLLTDYTEMKKAILHVYWEEFQVDPVGLMSRVAQPASKKIDQNKLKPEMDEKGNLTTAGFACSQCGQPLFVYKLEQVSEKGKAYTNYFGRCNVAEHEKLILLAQLKPEKDSDEAVTYSLGKFGQRALDFYSIHVTKESTHPVKPLAQIAGNRYASGPVGKALRDACMGTIASFLSKYQDIIIEHQKVVKGNQKRLESLRELAGKENLEYPSVTLPPQPHTKEGVDAYNEVIARVRMWVNLNLWQKLKLSRDDAKPLLRLKGFPSFPLVERQANEVDWWDMVCNVKKLINEKKEDGKVFWQNLAGYKRQEALRPYLSSEEDRKKGKKFARYQLGDLLLHLEKKHGEDWGKVYDEAWERIDKKVEGLSKHIKLEEERRSEDAQSKAALTDWLRAKASFVIEGLKEADDKDEFCRCELKLQKWYGDLRGKPFAIEAENSILDISGFSKQYNCAFIWQKDGVKKLNLYLIINYFKGGKLRFKKIKPEAFEANRFYTVINKKSGEIVPMEVNFNFDDPNLIILPLAFGKRQGREFIWNDLLSLETGSLKLANGRVIEKTLYNRRTRQDEPALFVALTFERREVLDSSNIKPMNLIGVDRGENIPAVIALTDPEGCPLSRFKDSLGNPTHILRIGESYKEKQRTIQAKKEVEQRRAGGYSRKYASKAKNLADDMVRNTARDLLYYAVTQDAMLIFENLSRGFGRQGKRTFMAERQYTRMEDWLTAKLAYEGLPSKTYLSKTLAQYTSKTCSNCGFTITSADYDRVLEKLKKTATGWMTTINGKELKVEGQITYYNRYKRQNVVKDLSVELDRLSEESVNNDISSWTKGRSGEALSLLKKRFSHRPVQEKFVCLNCGFETHADEQAALNIARSWLFLRSQEYKKYQTNKTTGNTDKRAFVETWQSFYRKKLKEVWKPAV

SEQ ID NO: 49327 - protein, 979 aa, synthetic construct
  REGION 1..979: note = engineered CasX variant
QEIKRINKIRRRLVKDSNTKKAGKTGPMKTLLVRVMTPDLRERLENLRKKPENIPQPISNTSRANLNKLLTDYTEMKKAILHVYWEEFQVDPVGLMSRVAQPASKKIDQNKLKPEMDEKGNLTTAGFACSQCGQPLFVYKLEQVSEKGKAYTNYFGRCNVAEHEKLILLAQLKPEKDSDEAVTYSLGKFGQRALDFYSIHVTKESTHPVKPLAQIAGNRYASGPVGKALRDACMGTIASFLSKYQDIIIEHQKVVKGNQKRLESLRELAGKENLEYPSVTLPPQPHTKEGVDAYNEVIARVRMWVNLNLWQKLKLSRDDAKPLLRLKGFPSFPLVERQANEVDWWDMVCNVKKLINEKKEDGKVFWQNLAGYKRQEALRPYLSSEEDRKKGKKFARYQLGDLLLHLEKKHGEDWGKVYDEAWERIDKKVEGLSKHIKLEEERRSEDAQSKAALTDWLRAKASFVIEGLKEADKDEFCRCELKLQKWYGDLRGKPFAIEAENSILDISGFSKQYNCAFIWQKDGVKKLNLYLIINYFKGGKLRFKKIKPEAFEANRFYTVINKKSGEIVPMEVNFNFDDPNLIILPLAFGKRQGREFIWNDLLSLETGSLKLANGRVIEKTLYNRRTRQDEPALFVALTFERREVLDSSNIKPMNLIGVDRGENIPAVIALTDPEGCPLSRFKDSLGNPTHILRIGESYKEKQRTIQAKKEVEQRRAGGYSRKYASKAKNLADDMVRNTARDLLYYAVTQDAMLIFENLSRGFGRQGKRTFMAERQYTRMEDWLTAKLAYEGLPSKTYLSKTLAQYTSKTCSNCGFTITSADYDRVLEKLKKTATGWMTTINGKELKVEGQITYYNRYKRQNVVKDLSVELDRLSEESVNNDISSWTKGRSGNEALSLLKKRFSHRPVQEKFVCLNCGFETHADEQAALNIARSWLFLRSQEYKKYQTNKTTGNTDKRAFVETWQSFYRKKLKEVWKPAV

SEQ ID NO: 49328 - protein, 978 aa, synthetic construct
  REGION 1..978: note = engineered CasX variant
QEIKRINKIRRRLVKDSNTKKAGKTGPMKTLLVRVMTPDLRERLENLRKKPENIPQPISNTSRANLNKLLTDYTEMKKAILHVYWEEFQVDPVGLMSRVAQPASKKIDQNKLKPEMDEKGNLTTAGFACSQCGQPLFVYKLEQVSEKGKAYTNYFGRCNVAEHEKLILLAQLKPEKDSDEAVTYSLGKFGQRALDFYSIHVTKESTHPVKPLAQIAGNRYASGPVGKALRDACMGTIASFLSKYQDIIIEHQKVVKGNQKRLESLRELAGKENLEYPSVTLPPQPHTKEGVDAYNEVIARVRMWVNLNLWQKLKLSRDDAKPLLRLKGFPSFPLVERQANEVDWWDMVCNVKKLINEKKEDGKVFWQNLAGYKRQEALRPYLSSEEDRQKGKKFARYQLGDLLLHLEKKHGEDWGKVYDEAWERIDKKVEGLSKHIKLEEERRSEDAQSKAALTDWLRAKASFVIEGLKEADKDEFCRCELKLQKWYGDLRGKPFAIEAENSILDISGFSKQYNCAFIWQKDGVKKLNLYLIINYFKGGKLRFKKIKPEAFEANRFYTVINKKSGEIVPMEVNFNFDDPNLIILPLAFGKRQGREFIWNDLLSLETGSLKLANGRVIEKTLYNRRTRQDEPALFVALTFERREVLDSSNIKPMNLIGVDRGENIPAVIALTDPEGCPLSRFKDSLGNPTHILRIGESYKEKQRTIQAKKEVEQRRAGGYSRKYASKAKNLADDMVRNTARDLLYYAVTQDAMLIFENLSRGFGRQGKRTFMAERQYTRMEDWLTAKLAYEGLPSKTYLSKTLAQYTSKTCSNCGFTITSADYDRVLEKLKKTATGWMTTINGKELKVEGQITYYNRYKRQNVVKDLSVELDRLSEESVNNDISSWTKGRSGEALSLLKKRFSHRPVQEKFVCLNCGFETHADEQAALNIARSWLFLRSQEYKKYQTNKTTGNTDKRAFVETWQSFYRKKLKEVWKPAV

SEQ ID NO: 49329 - protein, 978 aa, synthetic construct
  REGION 1..978: note = engineered CasX variant
QEIKRINKIRRRLVKDSNTKKAGKTGPMKTLLVRVMTPDLRERLENLRKKPENIPQPISNTSRANLNKLLTDYTEMKKAILHVYWEEFQVDPVGLMSRVAQPASKKIDQNKLKPEMDEKGNLTTAGFACSQCGQPLFVYKLEQVSEKGKAYTNYFGRCNVAEHEKLILLAQLKPEKDSDEAVTYSLGKFGQRALDFYSIHVTKESTHPVKPLAQIAGNRYASGPVGKALRDACMGTIASFLSKYQDIIIEHQKVVKGNQKRLESLRELAGKENLEYPSVTLPPQPHTKEGVDAYNEVIARVRMWVNLNLWQKLKLSRDDAKPLLRLKGFPSFPLVERQANEVDWWDMVCNVKKLINEKKEDGKVFWQNLAGYKRQEALRPYLSSEEDRKKGKKFARYQLGDLLLHLEKKHGEDWGKVYDEAWERIDKKVEGLSKHIKLEEERRSEDAQSKAALTDWLRAKASFVIEGLKEADKDEFCRCELKLQKWYGDLRGKPFAIEAENSILDISGFSKQYNCAFIWQKDGVKKLNLYLIINYFKGGKLRFKKIKPEAFEANRFYTVINKKSGEIVPMEVNFNFDDPNLIILPLAFGKRQGREFIWNDLLSLETGSLKLANGRVIEKTLYNRRTRQDEPALFVALTFERREVLDSSNIKPMNLIGVDRGENIPAVIALTDPEGCPLSRFKDSLGNPTHILRIGESYKEKQRTIQAKKEVEQRRAGGYSRKYASKAKNLADDMVRNTARDLLYYAVTQDAMLIFENLSRGFGRQGKRTFMAERQYTRMEDWLTAKLAYEGLPSQTYLSKTLAQYTSKTCSNCGFTITSADYDRVLEKLKKTATGWMTTINGKELKVEGQITYYNRYKRQNVVKDLSVELDRLSEESVNNDISSWTKGRSGEALSLLKKRFSHRPVQEKFVCLNCGFETHADEQAALNIARSWLFLRSQEYKKYQTNKTTGNTDKRAFVETWQSFYRKKLKEVWKPAV

SEQ ID NO: 49330 - protein, 978 aa, synthetic construct
  REGION 1..978: note = engineered CasX variant
QEIKRINKIRRRLVKDSNTKKAGKTGPMKTLLVRVMTPDLRERLENLRKKPENIPQPISNTSRANLNKLLTDYTEMKKAILHVYWEEFQVDPVGLMSRVAQPASKKIDQNKLKPEMDEKGNLTTAGFACSQCGQPLFVYKLEQVSEKGKAYTNYFGRCNVAEHEKLILLAQLKPEKDSDEAVTYSLGKFGQRALDFYSIHVTKESTHPVKPLAQIAGNRYASGPVGKALRDACMGTIASFLSKYQDIIIEHQKVVKGNQKRLESLRELAGKENLEYPSVTLPPQPHTKEGVDAYNEVIARVRMWVNLNLWQKLKLSRDDAKPLLRLKGFPSFPLVERQANEVDWWDMVCNVKKLINEKKEDGKVFWQNLAGYKRQEALRPYLSSEEDRKKGKKFARYQLGDLLLHLEKKHGEDWGKVYDEAWERIDKKVEGLSKHIKLEEERRSEDAQSKAALTDWLRAKASFVIEGLKEADKDEFCRCELKLQKWYGDLRGKPFAIEAENSILDISGFSKQYNCAFIWQKDGVKKLNLYLIINYFKGGKLRFKKIKPEAFEANRFYTVINKKSGEIVPMEVNFNFDDPNLIILPLAFGKRQGREFIWNDLLSLETGSLKLANGRVIEKTLYNRRTRQDEPALFVALTFERREVLDSSNIKPMNLIGVDRGENIPAVIALTDPEGCPLSRFKDSLGNPTHILRIGESYKEKQRTIQAKKEVEQRRAGGYSRKYASKAKNLADDMVRNTARDLLYYAVTQDAMLIFENLSRGFGRQGKRTFMAERQYTRMEDWLTAKLAYNGLPSKTYLSKTLAQYTSKTCSNCGFTITSADYDRVLEKLKKTATGWMTTINGKELKVEGQITYYNRYKRQNVVKDLSVELDRLSEESVNNDISSWTKGRSGEALSLLKKRFSHRPVQEKFVCLNCGFETHADEQAALNIARSWLFLRSQEYKKYQTNKTTGNTDKRAFVETWQSFYRKKLKEVWKPAV

SEQ ID NO: 49331 - protein, 978 aa, synthetic construct
  REGION 1..978: note = engineered CasX variant
QEIKRINKIRRRLVKDSNTKKAGKTGPMKTLLVRVMTPDLRERLENLRKKPENIPQPISNTSRANLNKLLTDYTEMKKAILHVYWEEFQVDPVGLMSRVAQPASKKIDQNKLKPEMDEKGNLTTAGFACSQCGQPLFVYKLEQVSEKGKAYTNYFGRCNVAEHEKLIQLAQLKPEKDSDEAVTYSLGKFGQRALDFYSIHVTKESTHPVKPLAQIAGNRYASGPVGKALRDACMGTIASFLSKYQDIIIEHQKVVKGNQKRLESLRELAGKENLEYPSVTLPPQPHTKEGVDAYNEVIARVRMWVNLNLWQKLKLSRDDAKPLLRLKGFPSFPLVERQANEVDWWDMVCNVKKLINEKKEDGKVFWQNLAGYKRQEALRPYLSSEEDRKKGKKFARYQLGDLLLHLEKKHGEDWGKVYDEAWERIDKKVEGLSKHIKLEEERRSEDAQSKAALTDWLRAKASFVIEGLKEADKDEFCRCELKLQKWYGDLRGKPFAIEAENSILDISGFSKQYNCAFIWQKDGVKKLNLYLIINYFKGGKLRFKKIKPEAFEANRFYTVINKKSGEIVPMEVNFNFDDPNLIILPLAFGKRQGREFIWNDLLSLETGSLKLANGRVIEKTLYNRRTRQDEPALFVALTFERREVLDSSNIKPMNLIGVDRGENIPAVIALTDPEGCPLSRFKDSLGNPTHILRIGESYKEKQRTIQAKKEVEQRRAGGYSRKYASKAKNLADDMVRNTARDLLYYAVTQDAMLIFENLSRGFGRQGKRTFMAERQYTRMEDWLTAKLAYEGLPSKTYLSKTLAQYTSKTCSNCGFTITSADYDRVLEKLKKTATGWMTTINGKELKVEGQITYYNRYKRQNVVKDLSVELDRLSEESVNNDISSWTKGRSGEALSLLKKRFSHRPVQEKFVCLNCGFETHADEQAALNIARSWLFLRSQEYKKYQTNKTTGNTDKRAFVETWQSFYRKKLKEVWKPAV

SEQ ID NO: 49332 - protein, 978 aa, synthetic construct
  REGION 1..978: note = engineered CasX variant
QEIKRINKIRRRLVKDSNTKKAGKTGPMKTLLVRVMTPDLRERLENLRKKPENIPQPISNTSRANLNKLLTDYTEMKKAILHVYWEEFQVDPVGLMSRVAQPASKKIDQNKLKPEMDEKGNLTTAGFACSQCGQPLFVYKLEQVSEKGKAYTNYFGRCNVAEHEKLILLAQLKPEKDSDEAVTYSLGKFGQRALDFYSIHVTKESTHPVKPLAQIAGNRYASGPVGKALRDACMGTIASFLSKYQDIIIEHQKVVKGNQKRLESLRELAGKENLEYPSVTLPPQPHTKEGVDAYNEVIARVRMWVNLNLWQKLKLSRDDAKPLLRLKGFPSFPLVERQANEVDWWDMVCNVKKLINEKKEDGKVFWQNLAIYKRQEALRPYLSSEEDRKKGKKFARYQLGDLLLHLEKKHGEDWGKVYDEAWERIDKKVEGLSKHIKLEEERRSEDAQSKAALTDWLRAKASFVIEGLKEADKDEFCRCELKLQKWYGDLRGKPFAIEAENSILDISGFSKQYNCAFIWQKDGVKKLNLYLIINYFKGGKLRFKKIKPEAFEANRFYTVINKKSGEIVPMEVNFNFDDPNLIILPLAFGKRQGREFIWNDLLSLETGSLKLANGRVIEKTLYNRRTRQDEPALFVALTFERREVLDSSNIKPMNLIGVDRGENIPAVIALTDPEGCPLSRFKDSLGNPTHILRIGESYKEKQRTIQAKKEVEQRRAGGYSRKYASKAKNLADDMVRNTARDLLYYAVTQDAMLIFENLSRGFGRQGKRTFMAERQYTRMEDWLTAKLAYEGLPSKTYLSKTLAQYTSKTCSNCGFTITSADYDRVLEKLKKTATGWMTTINGKELKVEGQITYYNRYKRQNVVKDLSVELDRLSEESVNNDISSWTKGRSGEALSLLKKRFSHRPVQEKFVCLNCGFETHADEQAALNIARSWLFLRSQEYKKYQTNKTTGNTDKRAFVETWQSFYRKKLKEVWKPAV

SEQ ID NO: 49333 - protein, 978 aa, synthetic construct
  REGION 1..978: note = engineered CasX variant
QEIKRINKIRRRLVKDSNTKKAGKTGPMKTLLVRVMTPDLRERLENLRKKPENIPQPISNTSRANLNKLLTDYTEMKKAILHVYWEEFQVDPVGLMSRVAQPASKKIDQNKLKPEMDEKGNLTTAGFACSQCGQPLFVYKLEQVSEKGKAYTNYFGRCNVAEHEKLILLAQLKPEKDSDEAVTYSLGKFGQRALDFYSIHVTKESTHPVKPLAQIAGNRYASGPVGKALRDACMGTIASFLSKYQDIIIEHQKVVKGNQKRLESLRELAGKENLEYPSVTLPPQPHTKEGVDAYNEVIARVRMWVNLNLWQKLKLSRDDAKPLLRLKGFPSFPLVERQANEVDWWDMVCNVKKLINEKKEDGKVFWQNLAGYKRQEALRPYLSSEEDREKGKKFARYQLGDLLLHLEKKHGEDWGKVYDEAWERIDKKVEGLSKHIKLEEERRSEDAQSKAALTDWLRAKASFVIEGLKEADKDEFCRCELKLQKWYGDLRGKPFAIEAENSILDISGFSKQYNCAFIWQKDGVKKLNLYLIINYFKGGKLRFKKIKPEAFEANRFYTVINKKSGEIVPMEVNFNFDDPNLIILPLAFGKRQGREFIWNDLLSLETGSLKLANGRVIEKTLYNRRTRQDEPALFVALTFERREVLDSSNIKPMNLIGVDRGENIPAVIALTDPEGCPLSRFKDSLGNPTHILRIGESYKEKQRTIQAKKEVEQRRAGGYSRKYASKAKNLADDMVRNTARDLLYYAVTQDAMLIFENLSRGFGRQGKRTFMAERQYTRMEDWLTAKLAYEGLPSKTYLSKTLAQYTSKTCSNCGFTITSADYDRVLEKLKKTATGWMTTINGKELKVEGQITYYNRYKRQNVVKDLSVELDRLSEESVNNDISSWTKGRSGEALSLLKKRFSHRPVQEKFVCLNCGFETHADEQAALNIARSWLFLRSQEYKKYQTNKTTGNTDKRAFVETWQSFYRKKLKEVWKPAV

SEQ ID NO: 49334 - protein, 978 aa, synthetic construct
  REGION 1..978: note = engineered CasX variant
QEIKRINKIRRRLVKDSNTKKAGKTGPMKTLLVRVMTPDLRERLENLRKKPENIPQPISNTSRANLNKLLTDYTEMKKAILHVYWEEFQVDPVGLMSRVAQPASKKIDQNKLKPEMDEKGNLTTAGFACSQCGQPLFVYKLEQVSEKGKAYTNYFGRCNVAEHEKLILLAQLKPEKDSDEAVTYSLGKFGQRALDFYSIHVTKESTHPVKPLAQIAGNRYASGPVGKALRDACMGTIASFLSKYQDIIIEHQKVVKGNQKRLESLRELAGKENLEYPSVTLPPQPHTKEGVDAYNEVIARVRMWVNLNLWQKLKLSRDDAKPLLRLKGFPSFPLVERQANEVDWWDMVCNVKKLINEKKEDGKVFWQNLAGYKRQEALRPYLSSEEDRKKGKKFARYQLGDLLLHLEKKHGEDWGKVYDEAWERIDKKVEGLSKHIKLEEERRSEDAQSKAALTDWLRAKASFVIEGLKEADKDEFCRCELKLQKWYGDLRGKPFAIEAENSILDISGFSKQYNCAFIWQKDGVKKLNLYLIINYFKGGKLRFKKIKPEAFEANRFYTVINKKSGEIVIMEVNFNFDDPNLIILPLAFGKRQGREFIWNDLLSLETGSLKLANGRVIEKTLYNRRTRQDEPALFVALTFERREVLDSSNIKPMNLIGVDRGENIPAVIALTDPEGCPLSRFKDSLGNPTHILRIGESYKEKQRTIQAKKEVEQRRAGGYSRKYASKAKNLADDMVRNTARDLLYYAVTQDAMLIFENLSRGFGRQGKRTFMAERQYTRMEDWLTAKLAYEGLPSKTYLSKTLAQYTSKTCSNCGFTITSADYDRVLEKLKKTATGWMTTINGKELKVEGQITYYNRYKRQNVVKDLSVELDRLSEESVNNDISSWTKGRSGEALSLLKKRFSHRPVQEKFVCLNCGFETHADEQAALNIARSWLFLRSQEYKKYQTNKTTGNTDKRAFVETWQSFYRKKLKEVWKPAV

SEQ ID NO: 49335 - protein, 978 aa, synthetic construct
  REGION 1..978: note = engineered CasX variant
QEIKRLNKIRRRLVKDSNTKKAGKTGPMKTLLVRVMTPDLRERLENLRKKPENIPQPISNTSRANLNKLLTDYTEMKKAILHVYWEEFQKDPVGLMSRVAQPASKKIDQNKLKPEMDEKGNLTTAGFACSQCGQPLFVYKLEQVSEKGKAYTNYFGRCNVAEHEKLILLAQLKPEKDSDEAVTYSLGKFGQRALDFYSIHVTKESTHPVKPLAQIAGNRYASGPVGKALRGACMGTIASFLSKYQDIIIEHQKVVKGNQKRLESLRELAGKENLEYPSVTLPPQPHTKEGVDAYNEVIARVRMWVNLNLWQKLKLSRDDAKPLLRLKGFPSFPLVERQANEVDWWDMVCNVKKLINEKKEDGKVFWQNLAGYKRQEALRPYLSSEEDRKKGKKFARYQLGDLLLHLEKKHGEDWGKVYDEAWERIDKKVEGLSKHIKLEEERRSEDAQSKAALTDWLRAKASFVIEGLKEADKDEFCRCELKLQKWYGDLRGKPFAIEAENSILDISGFSKQYNCAFIWQKDGVKKLNLYLIINYFKGGKLRFKKIKPEAFEANRFYTVINKKSGEIVPMEVNFNFDDPNLIILPLAFGKRQGREFIWNDLLSLETGSLKLANGRVIEKTLYNRRTRQDEPALFVALTFERREVLDSSNIKPMNLIGVDRGENIPAVIALTDPEGCPLSRFKDSLGNPTHILRIGESYKEKQRTIQAKKEVEQRRAGGYSRKYASKAKNLADDMVRNTARDLLYYAVTQDAMLIFENLSRGFGRQGKRTFMAERQYTRMEDWLTAKLAYEGLPSKTYLSKTLAQYTSKTCSNCGFTITSADYDRVLEKLKKTATGWMTTINGKELKVEGQITYYNRYKRQNVVKDLSVELDRLSEESVNNDISSWTKGRSGEALSLLKKRFSHRPVQEKFVCLNCGFETHADEQAALNIARSWLFLRSQEYKKYQTNKTTGNTDKRAFVETWQSFYRKKLKEVWKPAV

SEQ ID NO: 49336 - protein, 978 aa, synthetic construct
  REGION 1..978: note = engineered CasX variant
QEIKRLNKIRRRLVKDSNTKKAGKTGPMKTLLVRVMTPDLRERLENLRKKPENIPQPISNTSRANLNKLLTDYTEMKKAILHVYWEEFQKDPVGLMSRVAQPASKKIDQNKLKPEMDEKGNLTTAGFACSQCGQPLFVYKLEQVSEKGKAYTNYFGRCNVAEHEKLILLAQLKPEKDSDEAVTYSLGKFGQRALDFYSIHVTKESTHPVKPLAQIAGNRYASGPVGKALRDACMGTIASFLSKYQDIIIEHQKVVKGNQKRLESLRELAGKENLEYPSVTLPPQPHTKEGVDAYNEVIARVRMWVNLNLWQKLKLSRDDAKPLLRLKNFPSFPLVERQANEVDWWDMVCNVKKLINEKKEDGKVFWQNLAGYKRQEALRPYLSSEEDRKKGKKFARYQLGDLLLHLEKKHGEDWGKVYDEAWERIDKKVEGLSKHIKLEEERRSEDAQSKAALTDWLRAKASFVIEGLKEADKDEFCRCELKLQKWYGDLRGKPFAIEAENSILDISGFSKQYNCAFIWQKDGVKKLNLYLIINYFKGGKLRFKKIKPEAFEANRFYTVINKKSGEIVPMEVNFNFDDPNLIILPLAFGKRQGREFIWNDLLSLETGSLKLANGRVIEKTLYNRRTRQDEPALFVALTFERREVLDSSNIKPMNLIGVDRGENIPAVIALTDPEGCPLSRFKDSLGNPTHILRIGESYKEKQRTIQAKKEVEQRRAGGYSRKYASKAKNLADDMVRNTARDLLYYAVTQDAMLIFENLSRGFGRQGKRTFMAERQYTRMEDWLTAKLAYEGLPSKTYLSKTLAQYTSKTCSNCGFTITSADYDRVLEKLKKTATGWMTTINGKELKVEGQITYYNRYKRQNVVKDLSVELDRLSEESVNNDISSWTKGRSGEALSLLKKRFSHRPVQEKFVCLNCGFETHADEQAALNIARSWLFLRSQEYKKYQTNKTTGNTDKRAFVETWQSFYRKKLKEVWKPAV

SEQ ID NO: 49337 - protein, 978 aa, synthetic construct
  REGION 1..978: note = engineered CasX variant
QEIKRLNKIRRRLVKDSNTKKAGKTGPMKTLLVRVMTPDLRERLENLRKKPENIPQPISNTSRANLNKLLTDYTEMKKAILHVYWEEFQKDPVGLMSRVAQPASKKIDQNKLKPEMDEKGNLTTAGFACSQCGQPLFVYKLEQVSEKGKAYTNYFGRCNVAEHEKLILLAQLKPEKDSDEAVTYSLGKFGQRALDFYSIHVTKESTHPVKPLAQIAGNRYASGPVGKALRDACMGTIASFLSKYQDIIIEHQKVVKGNQKRLESLRELAGKENLEYPSVTLPPQPHTKEGVDAYNEVIARVRMWVNLNLWQKLKLSRDDAKPLLRLKGFPSFPLVERQANEVDWWDMVCNVKKLINEKKEDGKVFWQNLAGYKRQEALRPYLSSEEDRKKGKKFARYQLGDLLNHLEKKHGEDWGKVYDEAWERIDKKVEGLSKHIKLEEERRSEDAQSKAALTDWLRAKASFVIEGLKEADKDEFCRCELKLQKWYGDLRGKPFAIEAENSILDISGFSKQYNCAFIWQKDGVKKLNLYLIINYFKGGKLRFKKIKPEAFEANRFYTVINKKSGEIVPMEVNFNFDDPNLIILPLAFGKRQGREFIWNDLLSLETGSLKLANGRVIEKTLYNRRTRQDEPALFVALTFERREVLDSSNIKPMNLIGVDRGENIPAVIALTDPEGCPLSRFKDSLGNPTHILRIGESYKEKQRTIQAKKEVEQRRAGGYSRKYASKAKNLADDMVRNTARDLLYYAVTQDAMLIFENLSRGFGRQGKRTFMAERQYTRMEDWLTAKLAYEGLPSKTYLSKTLAQYTSKTCSNCGFTITSADYDRVLEKLKKTATGWMTTINGKELKVEGQITYYNRYKRQNVVKDLSVELDRLSEESVNNDISSWTKGRSGEALSLLKKRFSHRPVQEKFVCLNCGFETHADEQAALNIARSWLFLRSQEYKKYQTNKTTGNTDKRAFVETWQSFYRKKLKEVWKPAV

SEQ ID NO: 49338 - protein, 978 aa, synthetic construct
  REGION 1..978: note = engineered CasX variant
QEIKRLNKIRRRLVKDSNTKKAGKTGPMKTLLVRVMTPDLRERLENLRKKPENIPQPISNTSRANLNKLLTDYTEMKKAILHVYWEEFQKDPVGLMSRVAQPASKKIDQNKLKPEMDEKGNLTTAGFACSQCGQPLFVYKLEQVSEKGKAYTNYFGRCNVAEHEKLILLAQLKPEKDSDEAVTYSLGKFGQRALDFYSIHVTKESTHPVKPLAQIAGNRYASGPVGKALRDACMGTIASFLSKYQDIIIEHQKVVKGNQKRLESLRELAGKENLEYPSVTLPPQPHTKEGVDAYNEVIARVRMWVNLNLWQKLKLSRDDAKPLLRLKGFPSFPLVERQANEVDWWDMVCNVKKLINEKKEDGKVFWQNLAGYKRQEALRPYLSSEEDRKKGKKFARYQLGDLLWHLEKKHGEDWGKVYDEAWERIDKKVEGLSKHIKLEEERRSEDAQSKAALTDWLRAKASFVIEGLKEADKDEFCRCELKLQKWYGDLRGKPFAIEAENSILDISGFSKQYNCAFIWQKDGVKKLNLYLIINYFKGGKLRFKKIKPEAFEANRFYTVINKKSGEIVPMEVNFNFDDPNLIILPLAFGKRQGREFIWNDLLSLETGSLKLANGRVIEKTLYNRRTRQDEPALFVALTFERREVLDSSNIKPMNLIGVDRGENIPAVIALTDPEGCPLSRFKDSLGNPTHILRIGESYKEKQRTIQAKKEVEQRRAGGYSRKYASKAKNLADDMVRNTARDLLYYAVTQDAMLIFENLSRGFGRQGKRTFMAERQYTRMEDWLTAKLAYEGLPSKTYLSKTLAQYTSKTCSNCGFTITSADYDRVLEKLKKTATGWMTTINGKELKVEGQITYYNRYKRQNVVKDLSVELDRLSEESVNNDISSWTKGRSGEALSLLKKRFSHRPVQEKFVCLNCGFETHADEQAALNIARSWLFLRSQEYKKYQTNKTTGNTDKRAFVETWQSFYRKKLKEVWKPAV

SEQ ID NO: 49339 - protein, 978 aa, synthetic construct
  REGION 1..978: note = engineered CasX variant
QEIKRLNKIRRRLVKDSNTKKAGKTGPMKTLLVRVMTPDLRERLENLRKKPENIPQPISNTSRANLNKLLTDYTEMKKAILHVYWEEFQKDPVGLMSRVAQPASKKIDQNKLKPEMDEKGNLTTAGFACSQCGQPLFVYKLEQVSEKGKAYTNYFGRCNVAEHEKLILLAQLKPEKDSDEAVTYSLGKFGQRALDFYSIHVTKESTHPVKPLAQIAGNRYASGPVGKALRDACMGTIASFLSKYQDIIIEHQKVVKGNQKRLESLRELAGKENLEYPSVTLPPQPHTKEGVDAYNEVIARVRMWVNLNLWQKLKLSRDDAKPLLRLKGFPSFPLVERQANEVDWWDMVCNVKKLINEKKEDGKVFWQNLAGYKRQEALRPYLSSEEDRKKGKKFARYQLGDLLLHLYKKHGEDWGKVYDEAWERIDKKVEGLSKHIKLEEERRSEDAQSKAALTDWLRAKASFVIEGLKEADKDEFCRCELKLQKWYGDLRGKPFAIEAENSILDISGFSKQYNCAFIWQKDGVKKLNLYLIINYFKGGKLRFKKIKPEAFEANRFYTVINKKSGEIVPMEVNFNFDDPNLIILPLAFGKRQGREFIWNDLLSLETGSLKLANGRVIEKTLYNRRTRQDEPALFVALTFERREVLDSSNIKPMNLIGVDRGENIPAVIALTDPEGCPLSRFKDSLGNPTHILRIGESYKEKQRTIQAKKEVEQRRAGGYSRKYASKAKNLADDMVRNTARDLLYYAVTQDAMLIFENLSRGFGRQGKRTFMAERQYTRMEDWLTAKLAYEGLPSKTYLSKTLAQYTSKTCSNCGFTITSADYDRVLEKLKKTATGWMTTINGKELKVEGQITYYNRYKRQNVVKDLSVELDRLSEESVNNDISSWTKGRSGEALSLLKKRFSHRPVQEKFVCLNCGFETHADEQAALNIARSWLFLRSQEYKKYQTNKTTGNTDKRAFVETWQSFYRKKLKEVWKPAV

SEQ ID NO: 49340 - protein, 978 aa, synthetic construct
  REGION 1..978: note = engineered CasX variant
QEIKRLNKIRRRLVKDSNTKKAGKTGPMKTLLVRVMTPDLRERLENLRKKPENIPQPISNTSRANLNKLLTDYTEMKKAILHVYWEEFQKDPVGLMSRVAQPASKKIDQNKLKPEMDEKGNLTTAGFACSQCGQPLFVYKLEQVSEKGKAYTNYFGRCNVAEHEKLILLAQLKPEKDSDEAVTYSLGKFGQRALDFYSIHVTKESTHPVKPLAQIAGNRYASGPVGKALRDACMGTIASFLSKYQDIIIEHQKVVKGNQKRLESLRELAGKENLEYPSVTLPPQPHTKEGVDAYNEVIARVRMWVNLNLWQKLKLSRDDAKPLLRLKGFPSFPLVERQANEVDWWDMVCNVKKLINEKKEDGKVFWQNLAGYKRQEALRPYLSSEEDRKKGKKFARYQLGDLLLHLEKKHPEDWGKVYDEAWERIDKKVEGLSKHIKLEEERRSEDAQSKAALTDWLRAKASFVIEGLKEADKDEFCRCELKLQKWYGDLRGKPFAIEAENSILDISGFSKQYNCAFIWQKDGVKKLNLYLIINYFKGGKLRFKKIKPEAFEANRFYTVINKKSGEIVPMEVNFNFDDPNLIILPLAFGKRQGREFIWNDLLSLETGSLKLANGRVIEKTLYNRRTRQDEPALFVALTFERREVLDSSNIKPMNLIGVDRGENIPAVIALTDPEGCPLSRFKDSLGNPTHILRIGESYKEKQRTIQAKKEVEQRRAGGYSRKYASKAKNLADDMVRNTARDLLYYAVTQDAMLIFENLSRGFGRQGKRTFMAERQYTRMEDWLTAKLAYEGLPSKTYLSKTLAQYTSKTCSNCGFTITSADYDRVLEKLKKTATGWMTTINGKELKVEGQITYYNRYKRQNVVKDLSVELDRLSEESVNNDISSWTKGRSGEALSLLKKRFSHRPVQEKFVCLNCGFETHADEQAALNIARSWLFLRSQEYKKYQTNKTTGNTDKRAFVETWQSFYRKKLKEVWKPAV

SEQ ID NO: 49341 - protein, 979 aa, synthetic construct
  REGION 1..979: note = engineered CasX variant
QEIKRLNKIRRRLVKDSNTKKAGKTGPMKTLLVRVMTPDLRERLENLRKKPENIPQPISNTSRANLNKLLTDYTEMKKAILHVYWEEFQKDPVGLMSRVAQPASKKIDQNKLKPEMDEKGNLTTAGFACSQCGQPLFVYKLEQVSEKGKAYTNYFGRCNVAEHEKLILLAQLKPEKDSDEAVTYSLGKFGQRALDFYSIHVTKESTHPVKPLAQIAGNRYASGPVGKALRDACMGTIASFLSKYQDIIIEHQKVVKGNQKRLESLRELAGKENLEYPSVTLPPQPHTKEGVDAYNEVIARVRMWVNLNLWQKLKLSRDDAKPLLRLKGFPSFPLVERQANEVDWWDMVCNVKKLINEKKEDGKVFWQNLAGYKRQEALRPYLSSEEDRKKGKKFARYQLGDLLLHLEKKHGERDWGKVYDEAWERIDKKVEGLSKHIKLEEERRSEDAQSKAALTDWLRAKASFVIEGLKEADKDEFCRCELKLQKWYGDLRGKPFAIEAENSILDISGFSKQYNCAFIWQKDGVKKLNLYLIINYFKGGKLRFKKIKPEAFEANRFYTVINKKSGEIVPMEVNFNFDDPNLIILPLAFGKRQGREFIWNDLLSLETGSLKLANGRVIEKTLYNRRTRQDEPALFVALTFERREVLDSSNIKPMNLIGVDRGENIPAVIALTDPEGCPLSRFKDSLGNPTHILRIGESYKEKQRTIQAKKEVEQRRAGGYSRKYASKAKNLADDMVRNTARDLLYYAVTQDAMLIFENLSRGFGRQGKRTFMAERQYTRMEDWLTAKLAYEGLPSKTYLSKTLAQYTSKTCSNCGFTITSADYDRVLEKLKKTATGWMTTINGKELKVEGQITYYNRYKRQNVVKDLSVELDRLSEESVNNDISSWTKGRSGEALSLLKKRFSHRPVQEKFVCLNCGFETHADEQAALNIARSWLFLRSQEYKKYQTNKTTGNTDKRAFVETWQSFYRKKLKEVWKPAV

SEQ ID NO: 49342 - protein, 979 aa, synthetic construct
  REGION 1..979: note = engineered CasX variant
QEIKRLNKIRRRLVKDSNTKKAGKTGPMKTLLVRVMTPDLRERLENLRKKPENIPQPISNTSRANLNKLLTDYTEMKKAILHVYWEEFQKDPVGLMSRVAQPASKKIDQNKLKPEMDEKGNLTTAGFACSQCGQPLFVYKLEQVSEKGKAYTNYFGRCNVAEHEKLILLAQLKPEKDSDEAVTYSLGKFGQRALDFYSIHVTKESTHPVKPLAQIAGNRYASGPVGKALRDACMGTIASFLSKYQDIIIEHQKVVKGNQKRLESLRELAGKENLEYPSVTLPPQPHTKEGVDAYNEVIARVRMWVNLNLWQKLKLSRDDAKPLLRLKGFPSFPLVERQANEVDWWDMVCNVKKLINEKKEDGKVFWQNLAGYKRQEALRPYLSSEEDRKKGKKFARYQLGDLLLHLEKKHGEYDWGKVYDEAWERIDKKVEGLSKHIKLEEERRSEDAQSKAALTDWLRAKASFVIEGLKEADKDEFCRCELKLQKWYGDLRGKPFAIEAENSILDISGFSKQYNCAFIWQKDGVKKLNLYLIINYFKGGKLRFKKIKPEAFEANRFYTVINKKSGEIVPMEVNFNFDDPNLIILPLAFGKRQGREFIWNDLLSLETGSLKLANGRVIEKTLYNRRTRQDEPALFVALTFERREVLDSSNIKPMNLIGVDRGENIPAVIALTDPEGCPLSRFKDSLGNPTHILRIGESYKEKQRTIQAKKEVEQRRAGGYSRKYASKAKNLADDMVRNTARDLLYYAVTQDAMLIFENLSRGFGRQGKRTFMAERQYTRMEDWLTAKLAYEGLPSKTYLSKTLAQYTSKTCSNCGFTITSADYDRVLEKLKKTATGWMTTINGKELKVEGQITYYNRYKRQNVVKDLSVELDRLSEESVNNDISSWTKGRSGEALSLLKKRFSHRPVQEKFVCLNCGFETHADEQAALNIARSWLFLRSQEYKKYQTNKTTGNTDKRAFVETWQSFYRKKLKEVWKPAV

SEQ ID NO: 49343 - protein, 978 aa, synthetic construct
  REGION 1..978: note = engineered CasX variant
QEIKRLNKIRRRLVKDSNTKKAGKTGPMKTLLVRVMTPDLRERLENLRKKPENIPQPISNTSRANLNKLLTDYTEMKKAILHVYWEEFQKDPVGLMSRVAQPASKKIDQNKLKPEMDEKGNLTTAGFACSQCGQPLFVYKLEQVSEKGKAYTNYFGRCNVAEHEKLILLAQLKPEKDSDEAVTYSLGKFGQRALDFYSIHVTKESTHPVKPLAQIAGNRYASGPVGKALRDACMGTIASFLSKYQDIIIEHQKVVKGNQKRLESLRELAGKENLEYPSVTLPPQPHTKEGVDAYNEVIARVRMWVNLNLWQKLKLSRDDAKPLLRLKGFPSFPLVERQANEVDWWDMVCNVKKLINEKKEDGKVFWQNLAGYKRQEALRPYLSSEEDRKKGKKFARYQLGDLLLHLEKKHGEDWGDVYDEAWERIDKKVEGLSKHIKLEEERRSEDAQSKAALTDWLRAKASFVIEGLKEADKDEFCRCELKLQKWYGDLRGKPFAIEAENSILDISGFSKQYNCAFIWQKDGVKKLNLYLIINYFKGGKLRFKKIKPEAFEANRFYTVINKKSGEIVPMEVNFNFDDPNLIILPLAFGKRQGREFIWNDLLSLETGSLKLANGRVIEKTLYNRRTRQDEPALFVALTFERREVLDSSNIKPMNLIGVDRGENIPAVIALTDPEGCPLSRFKDSLGNPTHILRIGESYKEKQRTIQAKKEVEQRRAGGYSRKYASKAKNLADDMVRNTARDLLYYAVTQDAMLIFENLSRGFGRQGKRTFMAERQYTRMEDWLTAKLAYEGLPSKTYLSKTLAQYTSKTCSNCGFTITSADYDRVLEKLKKTATGWMTTINGKELKVEGQITYYNRYKRQNVVKDLSVELDRLSEESVNNDISSWTKGRSGEALSLLKKRFSHRPVQEKFVCLNCGFETHADEQAALNIARSWLFLRSQEYKKYQTNKTTGNTDKRAFVETWQSFYRKKLKEVWKPAV

SEQ ID NO: 49344 - protein, 978 aa, synthetic construct
  REGION 1..978: note = engineered CasX variant
QEIKRLNKIRRRLVKDSNTKKAGKTGPMKTLLVRVMTPDLRERLENLRKKPENIPQPISNTSRANLNKLLTDYTEMKKAILHVYWEEFQKDPVGLMSRVAQPASKKIDQNKLKPEMDEKGNLTTAGFACSQCGQPLFVYKLEQVSEKGKAYTNYFGRCNVAEHEKLILLAQLKPEKDSDEAVTYSLGKFGQRALDFYSIHVTKESTHPVKPLAQIAGNRYASGPVGKALRDACMGTIASFLSKYQDIIIEHQKVVKGNQKRLESLRELAGKENLEYPSVTLPPQPHTKEGVDAYNEVIARVRMWVNLNLWQKLKLSRDDAKPLLRLKGFPSFPLVERQANEVDWWDMVCNVKKLINEKKEDGKVFWQNLAGYKRQEALRPYLSSEEDRKKGKKFARYQLGDLLLHLEKKHGEDWGKVYGEAWERIDKKVEGLSKHIKLEEERRSEDAQSKAALTDWLRAKASFVIEGLKEADKDEFCRCELKLQKWYGDLRGKPFAIEAENSILDISGFSKQYNCAFIWQKDGVKKLNLYLIINYFKGGKLRFKKIKPEAFEANRFYTVINKKSGEIVPMEVNFNFDDPNLIILPLAFGKRQGREFIWNDLLSLETGSLKLANGRVIEKTLYNRRTRQDEPALFVALTFERREVLDSSNIKPMNLIGVDRGENIPAVIALTDPEGCPLSRFKDSLGNPTHILRIGESYKEKQRTIQAKKEVEQRRAGGYSRKYASKAKNLADDMVRNTARDLLYYAVTQDAMLIFENLSRGFGRQGKRTFMAERQYTRMEDWLTAKLAYEGLPSKTYLSKTLAQYTSKTCSNCGFTITSADYDRVLEKLKKTATGWMTTINGKELKVEGQITYYNRYKRQNVVKDLSVELDRLSEESVNNDISSWTKGRSGEALSLLKKRFSHRPVQEKFVCLNCGFETHADEQAALNIARSWLFLRSQEYKKYQTNKTTGNTDKRAFVETWQSFYRKKLKEVWKPAV

SEQ ID NO: 49345 - protein, 978 aa, synthetic construct
  REGION 1..978: note = engineered CasX variant
QEIKRLNKIRRRLVKDSNTKKAGKTGPMKTLLVRVMTPDLRERLENLRKKPENIPQPISNTSRANLNKLLTDYTEMKKAILHVYWEEFQKDPVGLMSRVAQPASKKIDQNKLKPEMDEKGNLTTAGFACSQCGQPLFVYKLEQVSEKGKAYTNYFGRCNVAEHEKLILLAQLKPEKDSDEAVTYSLGKFGQRALDFYSIHVTKESTHPVKPLAQIAGNRYASGPVGKALRDACMGTIASFLSKYQDIIIEHQKVVKGNQKRLESLRELAGKENLEYPSVTLPPQPHTKEGVDAYNEVIARVRMWVNLNLWQKLKLSRDDAKPLLRLKGFPSFPLVERQANEVDWWDMVCNVKKLINEKKEDGKVFWQNLAGYKRQEALRPYLSSEEDRKKGKKFARYQLGDLLLHLEKKHGEDWGKVYDEAWERIDKKVEGLSKHIKLEEERRSEDAQSKAALTDWLRAKASFVIEGKKEADKDEFCRCELKLQKWYGDLRGKPFAIEAENSILDISGFSKQYNCAFIWQKDGVKKLNLYLIINYFKGGKLRFKKIKPEAFEANRFYTVINKKSGEIVPMEVNFNFDDPNLIILPLAFGKRQGREFIWNDLLSLETGSLKLANGRVIEKTLYNRRTRQDEPALFVALTFERREVLDSSNIKPMNLIGVDRGENIPAVIALTDPEGCPLSRFKDSLGNPTHILRIGESYKEKQRTIQAKKEVEQRRAGGYSRKYASKAKNLADDMVRNTARDLLYYAVTQDAMLIFENLSRGFGRQGKRTFMAERQYTRMEDWLTAKLAYEGLPSKTYLSKTLAQYTSKTCSNCGFTITSADYDRVLEKLKKTATGWMTTINGKELKVEGQITYYNRYKRQNVVKDLSVELDRLSEESVNNDISSWTKGRSGEALSLLKKRFSHRPVQEKFVCLNCGFETHADEQAALNIARSWLFLRSQEYKKYQTNKTTGNTDKRAFVETWQSFYRKKLKEVWKPAV

SEQ ID NO: 49346 - protein, 978 aa, synthetic construct
  REGION 1..978: note = engineered CasX variant
QEIKRLNKIRRRLVKDSNTKKAGKTGPMKTLLVRVMTPDLRERLENLRKKPENIPQPISNTSRANLNKLLTDYTEMKKAILHVYWEEFQKDPVGLMSRVAQPASKKIDQNKLKPEMDEKGNLTTAGFACSQCGQPLFVYKLEQVSEKGKAYTNYFGRCNVAEHEKLILLAQLKPEKDSDEAVTYSLGKFGQRALDFYSIHVTKESTHPVKPLAQIAGNRYASGPVGKALRDACMGTIASFLSKYQDIIIEHQKVVKGNQKRLESLRELAGKENLEYPSVTLPPQPHTKEGVDAYNEVIARVRMWVNLNLWQKLKLSRDDAKPLLRLKGFPSFPLVERQANEVDWWDMVCNVKKLINEKKEDGKVFWQNLAGYKRQEALRPYLSSEEDRKKGKKFARYQLGDLLLHLEKKHGEDWGKVYDEAWERIDKKVEGLSKHIKLEEERRSEDAQSKAALTDWLRAKASFVIEGSKEADKDEFCRCELKLQKWYGDLRGKPFAIEAENSILDISGFSKQYNCAFIWQKDGVKKLNLYLIINYFKGGKLRFKKIKPEAFEANRFYTVINKKSGEIVPMEVNFNFDDPNLIILPLAFGKRQGREFIWNDLLSLETGSLKLANGRVIEKTLYNRRTRQDEPALFVALTFERREVLDSSNIKPMNLIGVDRGENIPAVIALTDPEGCPLSRFKDSLGNPTHILRIGESYKEKQRTIQAKKEVEQRRAGGYSRKYASKAKNLADDMVRNTARDLLYYAVTQDAMLIFENLSRGFGRQGKRTFMAERQYTRMEDWLTAKLAYEGLPSKTYLSKTLAQYTSKTCSNCGFTITSADYDRVLEKLKKTATGWMTTINGKELKVEGQITYYNRYKRQNVVKDLSVELDRLSEESVNNDISSWTKGRSGEALSLLKKRFSHRPVQEKFVCLNCGFETHADEQAALNIARSWLFLRSQEYKKYQTNKTTGNTDKRAFVETWQSFYRKKLKEVWKPAV

SEQ ID NO: 49347 - protein, 979 aa, synthetic construct
  REGION 1..979: note = engineered CasX variant
QEIKRLNKIRRRLVKDSNTKKAGKTGPMKTLLVRVMTPDLRERLENLRKKPENIPQPISNTSRANLNKLLTDYTEMKKAILHVYWEEFQKDPVGLMSRVAQPASKKIDQNKLKPEMDEKGNLTTAGFACSQCGQPLFVYKLEQVSEKGKAYTNYFGRCNVAEHEKLILLAQLKPEKDSDEAVTYSLGKFGQRALDFYSIHVTKESTHPVKPLAQIAGNRYASGPVGKALRDACMGTIASFLSKYQDIIIEHQKVVKGNQKRLESLRELAGKENLEYPSVTLPPQPHTKEGVDAYNEVIARVRMWVNLNLWQKLKLSRDDAKPLLRLKGFPSFPLVERQANEVDWWDMVCNVKKLINEKKEDGKVFWQNLAGYKRQEALRPYLSSEEDRKKGKKFARYQLGDLLLHLEKKHGEDWGKVYDEAWERIDKKVEGLSKHIKLEEERRSEDAQSKAALTDWLRAKASFVIEGLKEADDKDEFCRCELKLQKWYGDLRGKPFAIEAENSILDISGFSKQYNCAFIWQKDGVKKLNLYLIINYFKGGKLRFKKIKPEAFEANRFYTVINKKSGEIVPMEVNFNFDDPNLIILPLAFGKRQGREFIWNDLLSLETGSLKLANGRVIEKTLYNRRTRQDEPALFVALTFERREVLDSSNIKPMNLIGVDRGENIPAVIALTDPEGCPLSRFKDSLGNPTHILRIGESYKEKQRTIQAKKEVEQRRAGGYSRKYASKAKNLADDMVRNTARDLLYYAVTQDAMLIFENLSRGFGRQGKRTFMAERQYTRMEDWLTAKLAYEGLPSKTYLSKTLAQYTSKTCSNCGFTITSADYDRVLEKLKKTATGWMTTINGKELKVEGQITYYNRYKRQNVVKDLSVELDRLSEESVNNDISSWTKGRSGEALSLLKKRFSHRPVQEKFVCLNCGFETHADEQAALNIARSWLFLRSQEYKKYQTNKTTGNTDKRAFVETWQSFYRKKLKEVWKPAV

SEQ ID NO: 49348 - protein, 979 aa, synthetic construct
  REGION 1..979: note = engineered CasX variant
QEIKRLNKIRRRLVKDSNTKKAGKTGPMKTLLVRVMTPDLRERLENLRKKPENIPQPISNTSRANLNKLLTDYTEMKKAILHVYWEEFQKDPVGLMSRVAQPASKKIDQNKLKPEMDEKGNLTTAGFACSQCGQPLFVYKLEQVSEKGKAYTNYFGRCNVAEHEKLILLAQLKPEKDSDEAVTYSLGKFGQRALDFYSIHVTKESTHPVKPLAQIAGNRYASGPVGKALRDACMGTIASFLSKYQDIIIEHQKVVKGNQKRLESLRELAGKENLEYPSVTLPPQPHTKEGVDAYNEVIARVRMWVNLNLWQKLKLSRDDAKPLLRLKGFPSFPLVERQANEVDWWDMVCNVKKLINEKKEDGKVFWQNLAGYKRQEALRPYLSSEEDRKKGKKFARYQLGDLLLHLEKKHGEDWGKVYDEAWERIDKKVEGLSKHIKLEEERRSEDAQSKAALTDWLRAKASFVIEGLKEADKDEFCRCELKLQKWYGDLRGKPFAIEAENSILDISGFSKQYNCAFIWQKDGVKKLNLYLIINYFKGGKLRFKKIKPEAFEANRFYTVINKKSGEIVPMEVNFNFDDPNLIILPLAFGKRQGREFIWNDLLSLETGSLKLANGRVIEKTLYNRRTRQDEPALFVALTFERREVLDSSNIKPMNLIGVDRGENIPAVIALTDPEGCPLSRFKDSLGNPTHILRIGESYKEKQRTIQAKKEVEQRRAGGYSRKYASKAKNLADDMVRNTARDLLYYAVTQDAMLIFENLSRGFGRQGKRTFMAERQYTRMEDWLTAKLAYEGLPSKTYLSKTLAQYTSKTCSNCGFTITSADYDRVLEKLKKTATGWMTTINGKELKVEGQITYYNRYKRQNVVKDLSVELDRLSEESVNNDISSWTKGRSGNEALSLLKKRFSHRPVQEKFVCLNCGFETHADEQAALNIARSWLFLRSQEYKKYQTNKTTGNTDKRAFVETWQSFYRKKLKEVWKPAV

SEQ ID NO: 49349 - protein, 978 aa, synthetic construct
  REGION 1..978: note = engineered CasX variant
QEIKRLNKIRRRLVKDSNTKKAGKTGPMKTLLVRVMTPDLRERLENLRKKPENIPQPISNTSRANLNKLLTDYTEMKKAILHVYWEEFQKDPVGLMSRVAQPASKKIDQNKLKPEMDEKGNLTTAGFACSQCGQPLFVYKLEQVSEKGKAYTNYFGRCNVAEHEKLILLAQLKPEKDSDEAVTYSLGKFGQRALDFYSIHVTKESTHPVKPLAQIAGNRYASGPVGKALRDACMGTIASFLSKYQDIIIEHQKVVKGNQKRLESLRELAGKENLEYPSVTLPPQPHTKEGVDAYNEVIARVRMWVNLNLWQKLKLSRDDAKPLLRLKGFPSFPLVERQANEVDWWDMVCNVKKLINEKKEDGKVFWQNLAGYKRQEALRPYLSSEEDRQKGKKFARYQLGDLLLHLEKKHGEDWGKVYDEAWERIDKKVEGLSKHIKLEEERRSEDAQSKAALTDWLRAKASFVIEGLKEADKDEFCRCELKLQKWYGDLRGKPFAIEAENSILDISGFSKQYNCAFIWQKDGVKKLNLYLIINYFKGGKLRFKKIKPEAFEANRFYTVINKKSGEIVPMEVNFNFDDPNLIILPLAFGKRQGREFIWNDLLSLETGSLKLANGRVIEKTLYNRRTRQDEPALFVALTFERREVLDSSNIKPMNLIGVDRGENIPAVIALTDPEGCPLSRFKDSLGNPTHILRIGESYKEKQRTIQAKKEVEQRRAGGYSRKYASKAKNLADDMVRNTARDLLYYAVTQDAMLIFENLSRGFGRQGKRTFMAERQYTRMEDWLTAKLAYEGLPSKTYLSKTLAQYTSKTCSNCGFTITSADYDRVLEKLKKTATGWMTTINGKELKVEGQITYYNRYKRQNVVKDLSVELDRLSEESVNNDISSWTKGRSGEALSLLKKRFSHRPVQEKFVCLNCGFETHADEQAALNIARSWLFLRSQEYKKYQTNKTTGNTDKRAFVETWQSFYRKKLKEVWKPAV

SEQ ID NO: 49350 - protein, 978 aa, synthetic construct
  REGION 1..978: note = engineered CasX variant
QEIKRLNKIRRRLVKDSNTKKAGKTGPMKTLLVRVMTPDLRERLENLRKKPENIPQPISNTSRANLNKLLTDYTEMKKAILHVYWEEFQKDPVGLMSRVAQPASKKIDQNKLKPEMDEKGNLTTAGFACSQCGQPLFVYKLEQVSEKGKAYTNYFGRCNVAEHEKLILLAQLKPEKDSDEAVTYSLGKFGQRALDFYSIHVTKESTHPVKPLAQIAGNRYASGPVGKALRDACMGTIASFLSKYQDIIIEHQKVVKGNQKRLESLRELAGKENLEYPSVTLPPQPHTKEGVDAYNEVIARVRMWVNLNLWQKLKLSRDDAKPLLRLKGFPSFPLVERQANEVDWWDMVCNVKKLINEKKEDGKVFWQNLAGYKRQEALRPYLSSEEDRKKGKKFARYQLGDLLLHLEKKHGEDWGKVYDEAWERIDKKVEGLSKHIKLEEERRSEDAQSKAALTDWLRAKASFVIEGLKEADKDEFCRCELKLQKWYGDLRGKPFAIEAENSILDISGFSKQYNCAFIWQKDGVKKLNLYLIINYFKGGKLRFKKIKPEAFEANRFYTVINKKSGEIVPMEVNFNFDDPNLIILPLAFGKRQGREFIWNDLLSLETGSLKLANGRVIEKTLYNRRTRQDEPALFVALTFERREVLDSSNIKPMNLIGVDRGENIPAVIALTDPEGCPLSRFKDSLGNPTHILRIGESYKEKQRTIQAKKEVEQRRAGGYSRKYASKAKNLADDMVRNTARDLLYYAVTQDAMLIFENLSRGFGRQGKRTFMAERQYTRMEDWLTAKLAYEGLPSQTYLSKTLAQYTSKTCSNCGFTITSADYDRVLEKLKKTATGWMTTINGKELKVEGQITYYNRYKRQNVVKDLSVELDRLSEESVNNDISSWTKGRSGEALSLLKKRFSHRPVQEKFVCLNCGFETHADEQAALNIARSWLFLRSQEYKKYQTNKTTGNTDKRAFVETWQSFYRKKLKEVWKPAV

SEQ ID NO: 49351 - protein, 978 aa, synthetic construct
  REGION 1..978: note = engineered CasX variant
QEIKRLNKIRRRLVKDSNTKKAGKTGPMKTLLVRVMTPDLRERLENLRKKPENIPQPISNTSRANLNKLLTDYTEMKKAILHVYWEEFQKDPVGLMSRVAQPASKKIDQNKLKPEMDEKGNLTTAGFACSQCGQPLFVYKLEQVSEKGKAYTNYFGRCNVAEHEKLILLAQLKPEKDSDEAVTYSLGKFGQRALDFYSIHVTKESTHPVKPLAQIAGNRYASGPVGKALRDACMGTIASFLSKYQDIIIEHQKVVKGNQKRLESLRELAGKENLEYPSVTLPPQPHTKEGVDAYNEVIARVRMWVNLNLWQKLKLSRDDAKPLLRLKGFPSFPLVERQANEVDWWDMVCNVKKLINEKKEDGKVFWQNLAGYKRQEALRPYLSSEEDRKKGKKFARYQLGDLLLHLEKKHGEDWGKVYDEAWERIDKKVEGLSKHIKLEEERRSEDAQSKAALTDWLRAKASFVIEGLKEADKDEFCRCELKLQKWYGDLRGKPFAIEAENSILDISGFSKQYNCAFIWQKDGVKKLNLYLIINYFKGGKLRFKKIKPEAFEANRFYTVINKKSGEIVPMEVNFNFDDPNLIILPLAFGKRQGREFIWNDLLSLETGSLKLANGRVIEKTLYNRRTRQDEPALFVALTFERREVLDSSNIKPMNLIGVDRGENIPAVIALTDPEGCPLSRFKDSLGNPTHILRIGESYKEKQRTIQAKKEVEQRRAGGYSRKYASKAKNLADDMVRNTARDLLYYAVTQDAMLIFENLSRGFGRQGKRTFMAERQYTRMEDWLTAKLAYNGLPSKTYLSKTLAQYTSKTCSNCGFTITSADYDRVLEKLKKTATGWMTTINGKELKVEGQITYYNRYKRQNVVKDLSVELDRLSEESVNNDISSWTKGRSGEALSLLKKRFSHRPVQEKFVCLNCGFETHADEQAALNIARSWLFLRSQEYKKYQTNKTTGNTDKRAFVETWQSFYRKKLKEVWKPAV

SEQ ID NO: 49352 - protein, 978 aa, synthetic construct
  REGION 1..978: note = engineered CasX variant
QEIKRLNKIRRRLVKDSNTKKAGKTGPMKTLLVRVMTPDLRERLENLRKKPENIPQPISNTSRANLNKLLTDYTEMKKAILHVYWEEFQKDPVGLMSRVAQPASKKIDQNKLKPEMDEKGNLTTAGFACSQCGQPLFVYKLEQVSEKGKAYTNYFGRCNVAEHEKLIQLAQLKPEKDSDEAVTYSLGKFGQRALDFYSIHVTKESTHPVKPLAQIAGNRYASGPVGKALRDACMGTIASFLSKYQDIIIEHQKVVKGNQKRLESLRELAGKENLEYPSVTLPPQPHTKEGVDAYNEVIARVRMWVNLNLWQKLKLSRDDAKPLLRLKGFPSFPLVERQANEVDWWDMVCNVKKLINEKKEDGKVFWQNLAGYKRQEALRPYLSSEEDRKKGKKFARYQLGDLLLHLEKKHGEDWGKVYDEAWERIDKKVEGLSKHIKLEEERRSEDAQSKAALTDWLRAKASFVIEGLKEADKDEFCRCELKLQKWYGDLRGKPFAIEAENSILDISGFSKQYNCAFIWQKDGVKKLNLYLIINYFKGGKLRFKKIKPEAFEANRFYTVINKKSGEIVPMEVNFNFDDPNLIILPLAFGKRQGREFIWNDLLSLETGSLKLANGRVIEKTLYNRRTRQDEPALFVALTFERREVLDSSNIKPMNLIGVDRGENIPAVIALTDPEGCPLSRFKDSLGNPTHILRIGESYKEKQRTIQAKKEVEQRRAGGYSRKYASKAKNLADDMVRNTARDLLYYAVTQDAMLIFENLSRGFGRQGKRTFMAERQYTRMEDWLTAKLAYEGLPSKTYLSKTLAQYTSKTCSNCGFTITSADYDRVLEKLKKTATGWMTTINGKELKVEGQITYYNRYKRQNVVKDLSVELDRLSEESVNNDISSWTKGRSGEALSLLKKRFSHRPVQEKFVCLNCGFETHADEQAALNIARSWLFLRSQEYKKYQTNKTTGNTDKRAFVETWQSFYRKKLKEVWKPAV

SEQ ID NO: 49353 - protein, 978 aa, synthetic construct
  REGION 1..978: note = engineered CasX variant
QEIKRLNKIRRRLVKDSNTKKAGKTGPMKTLLVRVMTPDLRERLENLRKKPENIPQPISNTSRANLNKLLTDYTEMKKAILHVYWEEFQKDPVGLMSRVAQPASKKIDQNKLKPEMDEKGNLTTAGFACSQCGQPLFVYKLEQVSEKGKAYTNYFGRCNVAEHEKLILLAQLKPEKDSDEAVTYSLGKFGQRALDFYSIHVTKESTHPVKPLAQIAGNRYASGPVGKALRDACMGTIASFLSKYQDIIIEHQKVVKGNQKRLESLRELAGKENLEYPSVTLPPQPHTKEGVDAYNEVIARVRMWVNLNLWQKLKLSRDDAKPLLRLKGFPSFPLVERQANEVDWWDMVCNVKKLINEKKEDGKVFWQNLAIYKRQEALRPYLSSEEDRKKGKKFARYQLGDLLLHLEKKHGEDWGKVYDEAWERIDKKVEGLSKHIKLEEERRSEDAQSKAALTDWLRAKASFVIEGLKEADKDEFCRCELKLQKWYGDLRGKPFAIEAENSILDISGFSKQYNCAFIWQKDGVKKLNLYLIINYFKGGKLRFKKIKPEAFEANRFYTVINKKSGEIVPMEVNFNFDDPNLIILPLAFGKRQGREFIWNDLLSLETGSLKLANGRVIEKTLYNRRTRQDEPALFVALTFERREVLDSSNIKPMNLIGVDRGENIPAVIALTDPEGCPLSRFKDSLGNPTHILRIGESYKEKQRTIQAKKEVEQRRAGGYSRKYASKAKNLADDMVRNTARDLLYYAVTQDAMLIFENLSRGFGRQGKRTFMAERQYTRMEDWLTAKLAYEGLPSKTYLSKTLAQYTSKTCSNCGFTITSADYDRVLEKLKKTATGWMTTINGKELKVEGQITYYNRYKRQNVVKDLSVELDRLSEESVNNDISSWTKGRSGEALSLLKKRFSHRPVQEKFVCLNCGFETHADEQAALNIARSWLFLRSQEYKKYQTNKTTGNTDKRAFVETWQSFYRKKLKEVWKPAV

SEQ ID NO: 49354 - protein, 978 aa, synthetic construct
  REGION 1..978: note = engineered CasX variant
QEIKRLNKIRRRLVKDSNTKKAGKTGPMKTLLVRVMTPDLRERLENLRKKPENIPQPISNTSRANLNKLLTDYTEMKKAILHVYWEEFQKDPVGLMSRVAQPASKKIDQNKLKPEMDEKGNLTTAGFACSQCGQPLFVYKLEQVSEKGKAYTNYFGRCNVAEHEKLILLAQLKPEKDSDEAVTYSLGKFGQRALDFYSIHVTKESTHPVKPLAQIAGNRYASGPVGKALRDACMGTIASFLSKYQDIIIEHQKVVKGNQKRLESLRELAGKENLEYPSVTLPPQPHTKEGVDAYNEVIARVRMWVNLNLWQKLKLSRDDAKPLLRLKGFPSFPLVERQANEVDWWDMVCNVKKLINEKKEDGKVFWQNLAGYKRQEALRPYLSSEEDREKGKKFARYQLGDLLLHLEKKHGEDWGKVYDEAWERIDKKVEGLSKHIKLEEERRSEDAQSKAALTDWLRAKASFVIEGLKEADKDEFCRCELKLQKWYGDLRGKPFAIEAENSILDISGFSKQYNCAFIWQKDGVKKLNLYLIINYFKGGKLRFKKIKPEAFEANRFYTVINKKSGEIVPMEVNFNFDDPNLIILPLAFGKRQGREFIWNDLLSLETGSLKLANGRVIEKTLYNRRTRQDEPALFVALTFERREVLDSSNIKPMNLIGVDRGENIPAVIALTDPEGCPLSRFKDSLGNPTHILRIGESYKEKQRTIQAKKEVEQRRAGGYSRKYASKAKNLADDMVRNTARDLLYYAVTQDAMLIFENLSRGFGRQGKRTFMAERQYTRMEDWLTAKLAYEGLPSKTYLSKTLAQYTSKTCSNCGFTITSADYDRVLEKLKKTATGWMTTINGKELKVEGQITYYNRYKRQNVVKDLSVELDRLSEESVNNDISSWTKGRSGEALSLLKKRFSHRPVQEKFVCLNCGFETHADEQAALNIARSWLFLRSQEYKKYQTNKTTGNTDKRAFVETWQSFYRKKLKEVWKPAV

SEQ ID NO: 49355 - protein, 978 aa, synthetic construct
  REGION 1..978: note = engineered CasX variant
QEIKRLNKIRRRLVKDSNTKKAGKTGPMKTLLVRVMTPDLRERLENLRKKPENIPQPISNTSRANLNKLLTDYTEMKKAILHVYWEEFQKDPVGLMSRVAQPASKKIDQNKLKPEMDEKGNLTTAGFACSQCGQPLFVYKLEQVSEKGKAYTNYFGRCNVAEHEKLILLAQLKPEKDSDEAVTYSLGKFGQRALDFYSIHVTKESTHPVKPLAQIAGNRYASGPVGKALRDACMGTIASFLSKYQDIIIEHQKVVKGNQKRLESLRELAGKENLEYPSVTLPPQPHTKEGVDAYNEVIARVRMWVNLNLWQKLKLSRDDAKPLLRLKGFPSFPLVERQANEVDWWDMVCNVKKLINEKKEDGKVFWQNLAGYKRQEALRPYLSSEEDRKKGKKFARYQLGDLLLHLEKKHGEDWGKVYDEAWERIDKKVEGLSKHIKLEEERRSEDAQSKAALTDWLRAKASFVIEGLKEADKDEFCRCELKLQKWYGDLRGKPFAIEAENSILDISGFSKQYNCAFIWQKDGVKKLNLYLIINYFKGGKLRFKKIKPEAFEANRFYTVINKKSGEIVIMEVNFNFDDPNLIILPLAFGKRQGREFIWNDLLSLETGSLKLANGRVIEKTLYNRRTRQDEPALFVALTFERREVLDSSNIKPMNLIGVDRGENIPAVIALTDPEGCPLSRFKDSLGNPTHILRIGESYKEKQRTIQAKKEVEQRRAGGYSRKYASKAKNLADDMVRNTARDLLYYAVTQDAMLIFENLSRGFGRQGKRTFMAERQYTRMEDWLTAKLAYEGLPSKTYLSKTLAQYTSKTCSNCGFTITSADYDRVLEKLKKTATGWMTTINGKELKVEGQITYYNRYKRQNVVKDLSVELDRLSEESVNNDISSWTKGRSGEALSLLKKRFSHRPVQEKFVCLNCGFETHADEQAALNIARSWLFLRSQEYKKYQTNKTTGNTDKRAFVETWQSFYRKKLKEVWKPAV

SEQ ID NO: 49356 - protein, 978 aa, synthetic construct
  REGION 1..978: note = engineered CasX variant
QEIKRINKIRRRLVKDSNTKKAGKTGPMKTLLVRVMTPDLRERLENLRKKPENIPQPISNTSRANLNKLLTDYTEMKKAILHVYWEEFQKDPVGLMSRVAQPASKKIDQNKLKPEMDEKGNLTTAGFACSQCGQPLFVYKLEQVSEKGKAYTNYVGRCNVAEHEKLILLAQLKPEKDSDEAVTYSLGKFGQRALDFYSIHVTKESTHPVKPLAQIAGNRYASGPVGKALRGACMGTIASFLSKYQDIIIEHQKVVKGNQKRLESLRELAGKENLEYPSVTLPPQPHTKEGVDAYNEVIARVRMWVNLNLWQKLKLSRDDAKPLLRLKGFPSFPLVERQANEVDWWDMVCNVKKLINEKKEDGKVFWQNLAGYKRQEALRPYLSSEEDRKKGKKFARYQLGDLLLHLEKKHGEDWGKVYDEAWERIDKKVEGLSKHIKLEEERRSEDAQSKAALTDWLRAKASFVIEGLKEADKDEFCRCELKLQKWYGDLRGKPFAIEAENSILDISGFSKQYNCAFIWQKDGVKKLNLYLIINYFKGGKLRFKKIKPEAFEANRFYTVINKKSGEIVPMEVNFNFDDPNLIILPLAFGKRQGREFIWNDLLSLETGSLKLANGRVIEKTLYNRRTRQDEPALFVALTFERREVLDSSNIKPMNLIGVDRGENIPAVIALTDPEGCPLSRFKDSLGNPTHILRIGESYKEKQRTIQAKKEVEQRRAGGYSRKYASKAKNLADDMVRNTARDLLYYAVTQDAMLIFENLSRGFGRQGKRTFMAERQYTRMEDWLTAKLAYEGLPSKTYLSKTLAQYTSKTCSNCGFTITSADYDRVLEKLKKTATGWMTTINGKELKVEGQITYYNRYKRQNVVKDLSVELDRLSEESVNNDISSWTKGRSGEALSLLKKRFSHRPVQEKFVCLNCGFETHADEQAALNIARSWLFLRSQEYKKYQTNKTTGNTDKRAFVETWQSFYRKKLKEVWKPAV

SEQ ID NO: 49357 - protein, 978 aa, synthetic construct
  REGION 1..978: note = engineered CasX variant
QEIKRINKIRRRLVKDSNTKKAGKTGPMKTLLVRVMTPDLRERLENLRKKPENIPQPISNTSRANLNKLLTDYTEMKKAILHVYWEEFQKDPVGLMSRVAQPASKKIDQNKLKPEMDEKGNLTTAGFACSQCGQPLFVYKLEQVSEKGKAYTNYVGRCNVAEHEKLILLAQLKPEKDSDEAVTYSLGKFGQRALDFYSIHVTKESTHPVKPLAQIAGNRYASGPVGKALRDACMGTIASFLSKYQDIIIEHQKVVKGNQKRLESLRELAGKENLEYPSVTLPPQPHTKEGVDAYNEVIARVRMWVNLNLWQKLKLSRDDAKPLLRLKNFPSFPLVERQANEVDWWDMVCNVKKLINEKKEDGKVFWQNLAGYKRQEALRPYLSSEEDRKKGKKFARYQLGDLLLHLEKKHGEDWGKVYDEAWERIDKKVEGLSKHIKLEEERRSEDAQSKAALTDWLRAKASFVIEGLKEADKDEFCRCELKLQKWYGDLRGKPFAIEAENSILDISGFSKQYNCAFIWQKDGVKKLNLYLIINYFKGGKLRFKKIKPEAFEANRFYTVINKKSGEIVPMEVNFNFDDPNLIILPLAFGKRQGREFIWNDLLSLETGSLKLANGRVIEKTLYNRRTRQDEPALFVALTFERREVLDSSNIKPMNLIGVDRGENIPAVIALTDPEGCPLSRFKDSLGNPTHILRIGESYKEKQRTIQAKKEVEQRRAGGYSRKYASKAKNLADDMVRNTARDLLYYAVTQDAMLIFENLSRGFGRQGKRTFMAERQYTRMEDWLTAKLAYEGLPSKTYLSKTLAQYTSKTCSNCGFTITSADYDRVLEKLKKTATGWMTTINGKELKVEGQITYYNRYKRQNVVKDLSVELDRLSEESVNNDISSWTKGRSGEALSLLKKRFSHRPVQEKFVCLNCGFETHADEQAALNIARSWLFLRSQEYKKYQTNKTTGNTDKRAFVETWQSFYRKKLKEVWKPAV

SEQ ID NO: 49358 - protein, 978 aa, synthetic construct
  REGION 1..978: note = engineered CasX variant
QEIKRINKIRRRLVKDSNTKKAGKTGPMKTLLVRVMTPDLRERLENLRKKPENIPQPISNTSRANLNKLLTDYTEMKKAILHVYWEEFQKDPVGLMSRVAQPASKKIDQNKLKPEMDEKGNLTTAGFACSQCGQPLFVYKLEQVSEKGKAYTNYVGRCNVAEHEKLILLAQLKPEKDSDEAVTYSLGKFGQRALDFYSIHVTKESTHPVKPLAQIAGNRYASGPVGKALRDACMGTIASFLSKYQDIIIEHQKVVKGNQKRLESLRELAGKENLEYPSVTLPPQPHTKEGVDAYNEVIARVRMWVNLNLWQKLKLSRDDAKPLLRLKGFPSFPLVERQANEVDWWDMVCNVKKLINEKKEDGKVFWQNLAGYKRQEALRPYLSSEEDRKKGKKFARYQLGDLLNHLEKKHGEDWGKVYDEAWERIDKKVEGLSKHIKLEEERRSEDAQSKAALTDWLRAKASFVIEGLKEADKDEFCRCELKLQKWYGDLRGKPFAIEAENSILDISGFSKQYNCAFIWQKDGVKKLNLYLIINYFKGGKLRFKKIKPEAFEANRFYTVINKKSGEIVPMEVNFNFDDPNLIILPLAFGKRQGREFIWNDLLSLETGSLKLANGRVIEKTLYNRRTRQDEPALFVALTFERREVLDSSNIKPMNLIGVDRGENIPAVIALTDPEGCPLSRFKDSLGNPTHILRIGESYKEKQRTIQAKKEVEQRRAGGYSRKYASKAKNLADDMVRNTARDLLYYAVTQDAMLIFENLSRGFGRQGKRTFMAERQYTRMEDWLTAKLAYEGLPSKTYLSKTLAQYTSKTCSNCGFTITSADYDRVLEKLKKTATGWMTTINGKELKVEGQITYYNRYKRQNVVKDLSVELDRLSEESVNNDISSWTKGRSGEALSLLKKRFSHRPVQEKFVCLNCGFETHADEQAALNIARSWLFLRSQEYKKYQTNKTTGNTDKRAFVETWQSFYRKKLKEVWKPAV

SEQ ID NO: 49359 - protein, 978 aa, synthetic construct
  REGION 1..978: note = engineered CasX variant
QEIKRINKIRRRLVKDSNTKKAGKTGPMKTLLVRVMTPDLRERLENLRKKPENIPQPISNTSRANLNKLLTDYTEMKKAILHVYWEEFQKDPVGLMSRVAQPASKKIDQNKLKPEMDEKGNLTTAGFACSQCGQPLFVYKLEQVSEKGKAYTNYVGRCNVAEHEKLILLAQLKPEKDSDEAVTYSLGKFGQRALDFYSIHVTKESTHPVKPLAQIAGNRYASGPVGKALRDACMGTIASFLSKYQDIIIEHQKVVKGNQKRLESLRELAGKENLEYPSVTLPPQPHTKEGVDAYNEVIARVRMWVNLNLWQKLKLSRDDAKPLLRLKGFPSFPLVERQANEVDWWDMVCNVKKLINEKKEDGKVFWQNLAGYKRQEALRPYLSSEEDRKKGKKFARYQLGDLLWHLEKKHGEDWGKVYDEAWERIDKKVEGLSKHIKLEEERRSEDAQSKAALTDWLRAKASFVIEGLKEADKDEFCRCELKLQKWYGDLRGKPFAIEAENSILDISGFSKQYNCAFIWQKDGVKKLNLYLIINYFKGGKLRFKKIKPEAFEANRFYTVINKKSGEIVPMEVNFNFDDPNLIILPLAFGKRQGREFIWNDLLSLETGSLKLANGRVIEKTLYNRRTRQDEPALFVALTFERREVLDSSNIKPMNLIGVDRGENIPAVIALTDPEGCPLSRFKDSLGNPTHILRIGESYKEKQRTIQAKKEVEQRRAGGYSRKYASKAKNLADDMVRNTARDLLYYAVTQDAMLIFENLSRGFGRQGKRTFMAERQYTRMEDWLTAKLAYEGLPSKTYLSKTLAQYTSKTCSNCGFTITSADYDRVLEKLKKTATGWMTTINGKELKVEGQITYYNRYKRQNVVKDLSVELDRLSEESVNNDISSWTKGRSGEALSLLKKRFSHRPVQEKFVCLNCGFETHADEQAALNIARSWLFLRSQEYKKYQTNKTTGNTDKRAFVETWQSFYRKKLKEVWKPAV

SEQ ID NO: 49360 - protein, 978 aa, synthetic construct
  REGION 1..978: note = engineered CasX variant
QEIKRINKIRRRLVKDSNTKKAGKTGPMKTLLVRVMTPDLRERLENLRKKPENIPQPISNTSRANLNKLLTDYTEMKKAILHVYWEEFQKDPVGLMSRVAQPASKKIDQNKLKPEMDEKGNLTTAGFACSQCGQPLFVYKLEQVSEKGKAYTNYVGRCNVAEHEKLILLAQLKPEKDSDEAVTYSLGKFGQRALDFYSIHVTKESTHPVKPLAQIAGNRYASGPVGKALRDACMGTIASFLSKYQDIIIEHQKVVKGNQKRLESLRELAGKENLEYPSVTLPPQPHTKEGVDAYNEVIARVRMWVNLNLWQKLKLSRDDAKPLLRLKGFPSFPLVERQANEVDWWDMVCNVKKLINEKKEDGKVFWQNLAGYKRQEALRPYLSSEEDRKKGKKFARYQLGDLLLHLYKKHGEDWGKVYDEAWERIDKKVEGLSKHIKLEEERRSEDAQSKAALTDWLRAKASFVIEGLKEADKDEFCRCELKLQKWYGDLRGKPFAIEAENSILDISGFSKQYNCAFIWQKDGVKKLNLYLIINYFKGGKLRFKKIKPEAFEANRFYTVINKKSGEIVPMEVNFNFDDPNLIILPLAFGKRQGREFIWNDLLSLETGSLKLANGRVIEKTLYNRRTRQDEPALFVALTFERREVLDSSNIKPMNLIGVDRGENIPAVIALTDPEGCPLSRFKDSLGNPTHILRIGESYKEKQRTIQAKKEVEQRRAGGYSRKYASKAKNLADDMVRNTARDLLYYAVTQDAMLIFENLSRGFGRQGKRTFMAERQYTRMEDWLTAKLAYEGLPSKTYLSKTLAQYTSKTCSNCGFTITSADYDRVLEKLKKTATGWMTTINGKELKVEGQITYYNRYKRQNVVKDLSVELDRLSEESVNNDISSWTKGRSGEALSLLKKRFSHRPVQEKFVCLNCGFETHADEQAALNIARSWLFLRSQEYKKYQTNKTTGNTDKRAFVETWQSFYRKKLKEVWKPAV

SEQ ID NO: 49361 - protein, 978 aa, synthetic construct
  REGION 1..978: note = engineered CasX variant
QEIKRINKIRRRLVKDSNTKKAGKTGPMKTLLVRVMTPDLRERLENLRKKPENIPQPISNTSRANLNKLLTDYTEMKKAILHVYWEEFQKDPVGLMSRVAQPASKKIDQNKLKPEMDEKGNLTTAGFACSQCGQPLFVYKLEQVSEKGKAYTNYVGRCNVAEHEKLILLAQLKPEKDSDEAVTYSLGKFGQRALDFYSIHVTKESTHPVKPLAQIAGNRYASGPVGKALRDACMGTIASFLSKYQDIIIEHQKVVKGNQKRLESLRELAGKENLEYPSVTLPPQPHTKEGVDAYNEVIARVRMWVNLNLWQKLKLSRDDAKPLLRLKGFPSFPLVERQANEVDWWDMVCNVKKLINEKKEDGKVFWQNLAGYKRQEALRPYLSSEEDRKKGKKFARYQLGDLLLHLEKKHPEDWGKVYDEAWERIDKKVEGLSKHIKLEEERRSEDAQSKAALTDWLRAKASFVIEGLKEADKDEFCRCELKLQKWYGDLRGKPFAIEAENSILDISGFSKQYNCAFIWQKDGVKKLNLYLIINYFKGGKLRFKKIKPEAFEANRFYTVINKKSGEIVPMEVNFNFDDPNLIILPLAFGKRQGREFIWNDLLSLETGSLKLANGRVIEKTLYNRRTRQDEPALFVALTFERREVLDSSNIKPMNLIGVDRGENIPAVIALTDPEGCPLSRFKDSLGNPTHILRIGESYKEKQRTIQAKKEVEQRRAGGYSRKYASKAKNLADDMVRNTARDLLYYAVTQDAMLIFENLSRGFGRQGKRTFMAERQYTRMEDWLTAKLAYEGLPSKTYLSKTLAQYTSKTCSNCGFTITSADYDRVLEKLKKTATGWMTTINGKELKVEGQITYYNRYKRQNVVKDLSVELDRLSEESVNNDISSWTKGRSGEALSLLKKRFSHRPVQEKFVCLNCGFETHADEQAALNIARSWLFLRSQEYKKYQTNKTTGNTDKRAFVETWQSFYRKKLKEVWKPAV

SEQ ID NO: 49362 - protein, 979 aa, synthetic construct
  REGION 1..979: note = engineered CasX variant
QEIKRINKIRRRLVKDSNTKKAGKTGPMKTLLVRVMTPDLRERLENLRKKPENIPQPISNTSRANLNKLLTDYTEMKKAILHVYWEEFQKDPVGLMSRVAQPASKKIDQNKLKPEMDEKGNLTTAGFACSQCGQPLFVYKLEQVSEKGKAYTNYVGRCNVAEHEKLILLAQLKPEKDSDEAVTYSLGKFGQRALDFYSIHVTKESTHPVKPLAQIAGNRYASGPVGKALRDACMGTIASFLSKYQDIIIEHQKVVKGNQKRLESLRELAGKENLEYPSVTLPPQPHTKEGVDAYNEVIARVRMWVNLNLWQKLKLSRDDAKPLLRLKGFPSFPLVERQANEVDWWDMVCNVKKLINEKKEDGKVFWQNLAGYKRQEALRPYLSSEEDRKKGKKFARYQLGDLLLHLEKKHGERDWGKVYDEAWERIDKKVEGLSKHIKLEEERRSEDAQSKAALTDWLRAKASFVIEGLKEADKDEFCRCELKLQKWYGDLRGKPFAIEAENSILDISGFSKQYNCAFIWQKDGVKKLNLYLIINYFKGGKLRFKKIKPEAFEANRFYTVINKKSGEIVPMEVNFNFDDPNLIILPLAFGKRQGREFIWNDLLSLETGSLKLANGRVIEKTLYNRRTRQDEPALFVALTFERREVLDSSNIKPMNLIGVDRGENIPAVIALTDPEGCPLSRFKDSLGNPTHILRIGESYKEKQRTIQAKKEVEQRRAGGYSRKYASKAKNLADDMVRNTARDLLYYAVTQDAMLIFENLSRGFGRQGKRTFMAERQYTRMEDWLTAKLAYEGLPSKTYLSKTLAQYTSKTCSNCGFTITSADYDRVLEKLKKTATGWMTTINGKELKVEGQITYYNRYKRQNVVKDLSVELDRLSEESVNNDISSWTKGRSGEALSLLKKRFSHRPVQEKFVCLNCGFETHADEQAALNIARSWLFLRSQEYKKYQTNKTTGNTDKRAFVETWQSFYRKKLKEVWKPAV

SEQ ID NO: 49363 - protein, 979 aa, synthetic construct
  REGION 1..979: note = engineered CasX variant
QEIKRINKIRRRLVKDSNTKKAGKTGPMKTLLVRVMTPDLRERLENLRKKPENIPQPISNTSRANLNKLLTDYTEMKKAILHVYWEEFQKDPVGLMSRVAQPASKKIDQNKLKPEMDEKGNLTTAGFACSQCGQPLFVYKLEQVSEKGKAYTNYVGRCNVAEHEKLILLAQLKPEKDSDEAVTYSLGKFGQRALDFYSIHVTKESTHPVKPLAQIAGNRYASGPVGKALRDACMGTIASFLSKYQDIIIEHQKVVKGNQKRLESLRELAGKENLEYPSVTLPPQPHTKEGVDAYNEVIARVRMWVNLNLWQKLKLSRDDAKPLLRLKGFPSFPLVERQANEVDWWDMVCNVKKLINEKKEDGKVFWQNLAGYKRQEALRPYLSSEEDRKKGKKFARYQLGDLLLHLEKKHGEYDWGKVYDEAWERIDKKVEGLSKHIKLEEERRSEDAQSKAALTDWLRAKASFVIEGLKEADKDEFCRCELKLQKWYGDLRGKPFAIEAENSILDISGFSKQYNCAFIWQKDGVKKLNLYLIINYFKGGKLRFKKIKPEAFEANRFYTVINKKSGEIVPMEVNFNFDDPNLIILPLAFGKRQGREFIWNDLLSLETGSLKLANGRVIEKTLYNRRTRQDEPALFVALTFERREVLDSSNIKPMNLIGVDRGENIPAVIALTDPEGCPLSRFKDSLGNPTHILRIGESYKEKQRTIQAKKEVEQRRAGGYSRKYASKAKNLADDMVRNTARDLLYYAVTQDAMLIFENLSRGFGRQGKRTFMAERQYTRMEDWLTAKLAYEGLPSKTYLSKTLAQYTSKTCSNCGFTITSADYDRVLEKLKKTATGWMTTINGKELKVEGQITYYNRYKRQNVVKDLSVELDRLSEESVNNDISSWTKGRSGEALSLLKKRFSHRPVQEKFVCLNCGFETHADEQAALNIARSWLFLRSQEYKKYQTNKTTGNTDKRAFVETWQSFYRKKLKEVWKPAV

SEQ ID NO: 49364 - protein, 978 aa, synthetic construct
  REGION 1..978: note = engineered CasX variant
QEIKRINKIRRRLVKDSNTKKAGKTGPMKTLLVRVMTPDLRERLENLRKKPENIPQPISNTSRANLNKLLTDYTEMKKAILHVYWEEFQKDPVGLMSRVAQPASKKIDQNKLKPEMDEKGNLTTAGFACSQCGQPLFVYKLEQVSEKGKAYTNYVGRCNVAEHEKLILLAQLKPEKDSDEAVTYSLGKFGQRALDFYSIHVTKESTHPVKPLAQIAGNRYASGPVGKALRDACMGTIASFLSKYQDIIIEHQKVVKGNQKRLESLRELAGKENLEYPSVTLPPQPHTKEGVDAYNEVIARVRMWVNLNLWQKLKLSRDDAKPLLRLKGFPSFPLVERQANEVDWWDMVCNVKKLINEKKEDGKVFWQNLAGYKRQEALRPYLSSEEDRKKGKKFARYQLGDLLLHLEKKHGEDWGDVYDEAWERIDKKVEGLSKHIKLEEERRSEDAQSKAALTDWLRAKASFVIEGLKEADKDEFCRCELKLQKWYGDLRGKPFAIEAENSILDISGFSKQYNCAFIWQKDGVKKLNLYLIINYFKGGKLRFKKIKPEAFEANRFYTVINKKSGEIVPMEVNFNFDDPNLIILPLAFGKRQGREFIWNDLLSLETGSLKLANGRVIEKTLYNRRTRQDEPALFVALTFERREVLDSSNIKPMNLIGVDRGENIPAVIALTDPEGCPLSRFKDSLGNPTHILRIGESYKEKQRTIQAKKEVEQRRAGGYSRKYASKAKNLADDMVRNTARDLLYYAVTQDAMLIFENLSRGFGRQGKRTFMAERQYTRMEDWLTAKLAYEGLPSKTYLSKTLAQYTSKTCSNCGFTITSADYDRVLEKLKKTATGWMTTINGKELKVEGQITYYNRYKRQNVVKDLSVELDRLSEESVNNDISSWTKGRSGEALSLLKKRFSHRPVQEKFVCLNCGFETHADEQAALNIARSWLFLRSQEYKKYQTNKTTGNTDKRAFVETWQSFYRKKLKEVWKPAV

SEQ ID NO: 49365 - protein, 978 aa, synthetic construct
  REGION 1..978: note = engineered CasX variant
QEIKRINKIRRRLVKDSNTKKAGKTGPMKTLLVRVMTPDLRERLENLRKKPENIPQPISNTSRANLNKLLTDYTEMKKAILHVYWEEFQKDPVGLMSRVAQPASKKIDQNKLKPEMDEKGNLTTAGFACSQCGQPLFVYKLEQVSEKGKAYTNYVGRCNVAEHEKLILLAQLKPEKDSDEAVTYSLGKFGQRALDFYSIHVTKESTHPVKPLAQIAGNRYASGPVGKALRDACMGTIASFLSKYQDIIIEHQKVVKGNQKRLESLRELAGKENLEYPSVTLPPQPHTKEGVDAYNEVIARVRMWVNLNLWQKLKLSRDDAKPLLRLKGFPSFPLVERQANEVDWWDMVCNVKKLINEKKEDGKVFWQNLAGYKRQEALRPYLSSEEDRKKGKKFARYQLGDLLLHLEKKHGEDWGKVYGEAWERIDKKVEGLSKHIKLEEERRSEDAQSKAALTDWLRAKASFVIEGLKEADKDEFCRCELKLQKWYGDLRGKPFAIEAENSILDISGFSKQYNCAFIWQKDGVKKLNLYLIINYFKGGKLRFKKIKPEAFEANRFYTVINKKSGEIVPMEVNFNFDDPNLIILPLAFGKRQGREFIWNDLLSLETGSLKLANGRVIEKTLYNRRTRQDEPALFVALTFERREVLDSSNIKPMNLIGVDRGENIPAVIALTDPEGCPLSRFKDSLGNPTHILRIGESYKEKQRTIQAKKEVEQRRAGGYSRKYASKAKNLADDMVRNTARDLLYYAVTQDAMLIFENLSRGFGRQGKRTFMAERQYTRMEDWLTAKLAYEGLPSKTYLSKTLAQYTSKTCSNCGFTITSADYDRVLEKLKKTATGWMTTINGKELKVEGQITYYNRYKRQNVVKDLSVELDRLSEESVNNDISSWTKGRSGEALSLLKKRFSHRPVQEKFVCLNCGFETHADEQAALNIARSWLFLRSQEYKKYQTNKTTGNTDKRAFVETWQSFYRKKLKEVWKPAV

SEQ ID NO: 49366 - protein, 978 aa, synthetic construct
  REGION 1..978: note = engineered CasX variant
QEIKRINKIRRRLVKDSNTKKAGKTGPMKTLLVRVMTPDLRERLENLRKKPENIPQPISNTSRANLNKLLTDYTEMKKAILHVYWEEFQKDPVGLMSRVAQPASKKIDQNKLKPEMDEKGNLTTAGFACSQCGQPLFVYKLEQVSEKGKAYTNYVGRCNVAEHEKLILLAQLKPEKDSDEAVTYSLGKFGQRALDFYSIHVTKESTHPVKPLAQIAGNRYASGPVGKALRDACMGTIASFLSKYQDIIIEHQKVVKGNQKRLESLRELAGKENLEYPSVTLPPQPHTKEGVDAYNEVIARVRMWVNLNLWQKLKLSRDDAKPLLRLKGFPSFPLVERQANEVDWWDMVCNVKKLINEKKEDGKVFWQNLAGYKRQEALRPYLSSEEDRKKGKKFARYQLGDLLLHLEKKHGEDWGKVYDEAWERIDKKVEGLSKHIKLEEERRSEDAQSKAALTDWLRAKASFVIEGKKEADKDEFCRCELKLQKWYGDLRGKPFAIEAENSILDISGFSKQYNCAFIWQKDGVKKLNLYLIINYFKGGKLRFKKIKPEAFEANRFYTVINKKSGEIVPMEVNFNFDDPNLIILPLAFGKRQGREFIWNDLLSLETGSLKLANGRVIEKTLYNRRTRQDEPALFVALTFERREVLDSSNIKPMNLIGVDRGENIPAVIALTDPEGCPLSRFKDSLGNPTHILRIGESYKEKQRTIQAKKEVEQRRAGGYSRKYASKAKNLADDMVRNTARDLLYYAVTQDAMLIFENLSRGFGRQGKRTFMAERQYTRMEDWLTAKLAYEGLPSKTYLSKTLAQYTSKTCSNCGFTITSADYDRVLEKLKKTATGWMTTINGKELKVEGQITYYNRYKRQNVVKDLSVELDRLSEESVNNDISSWTKGRSGEALSLLKKRFSHRPVQEKFVCLNCGFETHADEQAALNIARSWLFLRSQEYKKYQTNKTTGNTDKRAFVETWQSFYRKKLKEVWKPAV

SEQ ID NO: 49367 - protein, 978 aa, synthetic construct
  REGION 1..978: note = engineered CasX variant
QEIKRINKIRRRLVKDSNTKKAGKTGPMKTLLVRVMTPDLRERLENLRKKPENIPQPISNTSRANLNKLLTDYTEMKKAILHVYWEEFQKDPVGLMSRVAQPASKKIDQNKLKPEMDEKGNLTTAGFACSQCGQPLFVYKLEQVSEKGKAYTNYVGRCNVAEHEKLILLAQLKPEKDSDEAVTYSLGKFGQRALDFYSIHVTKESTHPVKPLAQIAGNRYASGPVGKALRDACMGTIASFLSKYQDIIIEHQKVVKGNQKRLESLRELAGKENLEYPSVTLPPQPHTKEGVDAYNEVIARVRMWVNLNLWQKLKLSRDDAKPLLRLKGFPSFPLVERQANEVDWWDMVCNVKKLINEKKEDGKVFWQNLAGYKRQEALRPYLSSEEDRKKGKKFARYQLGDLLLHLEKKHGEDWGKVYDEAWERIDKKVEGLSKHIKLEEERRSEDAQSKAALTDWLRAKASFVIEGSKEADKDEFCRCELKLQKWYGDLRGKPFAIEAENSILDISGFSKQYNCAFIWQKDGVKKLNLYLIINYFKGGKLRFKKIKPEAFEANRFYTVINKKSGEIVPMEVNFNFDDPNLIILPLAFGKRQGREFIWNDLLSLETGSLKLANGRVIEKTLYNRRTRQDEPALFVALTFERREVLDSSNIKPMNLIGVDRGENIPAVIALTDPEGCPLSRFKDSLGNPTHILRIGESYKEKQRTIQAKKEVEQRRAGGYSRKYASKAKNLADDMVRNTARDLLYYAVTQDAMLIFENLSRGFGRQGKRTFMAERQYTRMEDWLTAKLAYEGLPSKTYLSKTLAQYTSKTCSNCGFTITSADYDRVLEKLKKTATGWMTTINGKELKVEGQITYYNRYKRQNVVKDLSVELDRLSEESVNNDISSWTKGRSGEALSLLKKRFSHRPVQEKFVCLNCGFETHADEQAALNIARSWLFLRSQEYKKYQTNKTTGNTDKRAFVETWQSFYRKKLKEVWKPAV

SEQ ID NO: 49368 - protein, 979 aa, synthetic construct
  REGION 1..979: note = engineered CasX variant
QEIKRINKIRRRLVKDSNTKKAGKTGPMKTLLVRVMTPDLRERLENLRKKPENIPQPISNTSRANLNKLLTDYTEMKKAILHVYWEEFQKDPVGLMSRVAQPASKKIDQNKLKPEMDEKGNLTTAGFACSQCGQPLFVYKLEQVSEKGKAYTNYVGRCNVAEHEKLILLAQLKPEKDSDEAVTYSLGKFGQRALDFYSIHVTKESTHPVKPLAQIAGNRYASGPVGKALRDACMGTIASFLSKYQDIIIEHQKVVKGNQKRLESLRELAGKENLEYPSVTLPPQPHTKEGVDAYNEVIARVRMWVNLNLWQKLKLSRDDAKPLLRLKGFPSFPLVERQANEVDWWDMVCNVKKLINEKKEDGKVFWQNLAGYKRQEALRPYLSSEEDRKKGKKFARYQLGDLLLHLEKKHGEDWGKVYDEAWERIDKKVEGLSKHIKLEEERRSEDAQSKAALTDWLRAKASFVIEGLKEADDKDEFCRCELKLQKWYGDLRGKPFAIEAENSILDISGFSKQYNCAFIWQKDGVKKLNLYLIINYFKGGKLRFKKIKPEAFEANRFYTVINKKSGEIVPMEVNFNFDDPNLIILPLAFGKRQGREFIWNDLLSLETGSLKLANGRVIEKTLYNRRTRQDEPALFVALTFERREVLDSSNIKPMNLIGVDRGENIPAVIALTDPEGCPLSRFKDSLGNPTHILRIGESYKEKQRTIQAKKEVEQRRAGGYSRKYASKAKNLADDMVRNTARDLLYYAVTQDAMLIFENLSRGFGRQGKRTFMAERQYTRMEDWLTAKLAYEGLPSKTYLSKTLAQYTSKTCSNCGFTITSADYDRVLEKLKKTATGWMTTINGKELKVEGQITYYNRYKRQNVVKDLSVELDRLSEESVNNDISSWTKGRSGEALSLLKKRFSHRPVQEKFVCLNCGFETHADEQAALNIARSWLFLRSQEYKKYQTNKTTGNTDKRAFVETWQSFYRKKLKEVWKPAV

SEQ ID NO: 49369 - protein, 979 aa, synthetic construct
  REGION 1..979: note = engineered CasX variant
QEIKRINKIRRRLVKDSNTKKAGKTGPMKTLLVRVMTPDLRERLENLRKKPENIPQPISNTSRANLNKLLTDYTEMKKAILHVYWEEFQKDPVGLMSRVAQPASKKIDQNKLKPEMDEKGNLTTAGFACSQCGQPLFVYKLEQVSEKGKAYTNYVGRCNVAEHEKLILLAQLKPEKDSDEAVTYSLGKFGQRALDFYSIHVTKESTHPVKPLAQIAGNRYASGPVGKALRDACMGTIASFLSKYQDIIIEHQKVVKGNQKRLESLRELAGKENLEYPSVTLPPQPHTKEGVDAYNEVIARVRMWVNLNLWQKLKLSRDDAKPLLRLKGFPSFPLVERQANEVDWWDMVCNVKKLINEKKEDGKVFWQNLAGYKRQEALRPYLSSEEDRKKGKKFARYQLGDLLLHLEKKHGEDWGKVYDEAWERIDKKVEGLSKHIKLEEERRSEDAQSKAALTDWLRAKASFVIEGLKEADKDEFCRCELKLQKWYGDLRGKPFAIEAENSILDISGFSKQYNCAFIWQKDGVKKLNLYLIINYFKGGKLRFKKIKPEAFEANRFYTVINKKSGEIVPMEVNFNFDDPNLIILPLAFGKRQGREFIWNDLLSLETGSLKLANGRVIEKTLYNRRTRQDEPALFVALTFERREVLDSSNIKPMNLIGVDRGENIPAVIALTDPEGCPLSRFKDSLGNPTHILRIGESYKEKQRTIQAKKEVEQRRAGGYSRKYASKAKNLADDMVRNTARDLLYYAVTQDAMLIFENLSRGFGRQGKRTFMAERQYTRMEDWLTAKLAYEGLPSKTYLSKTLAQYTSKTCSNCGFTITSADYDRVLEKLKKTATGWMTTINGKELKVEGQITYYNRYKRQNVVKDLSVELDRLSEESVNNDISSWTKGRSGNEALSLLKKRFSHRPVQEKFVCLNCGFETHADEQAALNIARSWLFLRSQEYKKYQTNKTTGNTDKRAFVETWQSFYRKKLKEVWKPAV

SEQ ID NO: 49370 - protein, 978 aa, synthetic construct
  REGION 1..978: note = engineered CasX variant
QEIKRINKIRRRLVKDSNTKKAGKTGPMKTLLVRVMTPDLRERLENLRKKPENIPQPISNTSRANLNKLLTDYTEMKKAILHVYWEEFQKDPVGLMSRVAQPASKKIDQNKLKPEMDEKGNLTTAGFACSQCGQPLFVYKLEQVSEKGKAYTNYVGRCNVAEHEKLILLAQLKPEKDSDEAVTYSLGKFGQRALDFYSIHVTKESTHPVKPLAQIAGNRYASGPVGKALRDACMGTIASFLSKYQDIIIEHQKVVKGNQKRLESLRELAGKENLEYPSVTLPPQPHTKEGVDAYNEVIARVRMWVNLNLWQKLKLSRDDAKPLLRLKGFPSFPLVERQANEVDWWDMVCNVKKLINEKKEDGKVFWQNLAGYKRQEALRPYLSSEEDRQKGKKFARYQLGDLLLHLEKKHGEDWGKVYDEAWERIDKKVEGLSKHIKLEEERRSEDAQSKAALTDWLRAKASFVIEGLKEADKDEFCRCELKLQKWYGDLRGKPFAIEAENSILDISGFSKQYNCAFIWQKDGVKKLNLYLIINYFKGGKLRFKKIKPEAFEANRFYTVINKKSGEIVPMEVNFNFDDPNLIILPLAFGKRQGREFIWNDLLSLETGSLKLANGRVIEKTLYNRRTRQDEPALFVALTFERREVLDSSNIKPMNLIGVDRGENIPAVIALTDPEGCPLSRFKDSLGNPTHILRIGESYKEKQRTIQAKKEVEQRRAGGYSRKYASKAKNLADDMVRNTARDLLYYAVTQDAMLIFENLSRGFGRQGKRTFMAERQYTRMEDWLTAKLAYEGLPSKTYLSKTLAQYTSKTCSNCGFTITSADYDRVLEKLKKTATGWMTTINGKELKVEGQITYYNRYKRQNVVKDLSVELDRLSEESVNNDISSWTKGRSGEALSLLKKRFSHRPVQEKFVCLNCGFETHADEQAALNIARSWLFLRSQEYKKYQTNKTTGNTDKRAFVETWQSFYRKKLKEVWKPAV

SEQ ID NO: 49371 - protein, 978 aa, synthetic construct
  REGION 1..978: note = engineered CasX variant
QEIKRINKIRRRLVKDSNTKKAGKTGPMKTLLVRVMTPDLRERLENLRKKPENIPQPISNTSRANLNKLLTDYTEMKKAILHVYWEEFQKDPVGLMSRVAQPASKKIDQNKLKPEMDEKGNLTTAGFACSQCGQPLFVYKLEQVSEKGKAYTNYVGRCNVAEHEKLILLAQLKPEKDSDEAVTYSLGKFGQRALDFYSIHVTKESTHPVKPLAQIAGNRYASGPVGKALRDACMGTIASFLSKYQDIIIEHQKVVKGNQKRLESLRELAGKENLEYPSVTLPPQPHTKEGVDAYNEVIARVRMWVNLNLWQKLKLSRDDAKPLLRLKGFPSFPLVERQANEVDWWDMVCNVKKLINEKKEDGKVFWQNLAGYKRQEALRPYLSSEEDRKKGKKFARYQLGDLLLHLEKKHGEDWGKVYDEAWERIDKKVEGLSKHIKLEEERRSEDAQSKAALTDWLRAKASFVIEGLKEADKDEFCRCELKLQKWYGDLRGKPFAIEAENSILDISGFSKQYNCAFIWQKDGVKKLNLYLIINYFKGGKLRFKKIKPEAFEANRFYTVINKKSGEIVPMEVNFNFDDPNLIILPLAFGKRQGREFIWNDLLSLETGSLKLANGRVIEKTLYNRRTRQDEPALFVALTFERREVLDSSNIKPMNLIGVDRGENIPAVIALTDPEGCPLSRFKDSLGNPTHILRIGESYKEKQRTIQAKKEVEQRRAGGYSRKYASKAKNLADDMVRNTARDLLYYAVTQDAMLIFENLSRGFGRQGKRTFMAERQYTRMEDWLTAKLAYEGLPSQTYLSKTLAQYTSKTCSNCGFTITSADYDRVLEKLKKTATGWMTTINGKELKVEGQITYYNRYKRQNVVKDLSVELDRLSEESVNNDISSWTKGRSGEALSLLKKRFSHRPVQEKFVCLNCGFETHADEQAALNIARSWLFLRSQEYKKYQTNKTTGNTDKRAFVETWQSFYRKKLKEVWKPAV

SEQ ID NO: 49372 - protein, 978 aa, synthetic construct
  REGION 1..978: note = engineered CasX variant
QEIKRINKIRRRLVKDSNTKKAGKTGPMKTLLVRVMTPDLRERLENLRKKPENIPQPISNTSRANLNKLLTDYTEMKKAILHVYWEEFQKDPVGLMSRVAQPASKKIDQNKLKPEMDEKGNLTTAGFACSQCGQPLFVYKLEQVSEKGKAYTNYVGRCNVAEHEKLILLAQLKPEKDSDEAVTYSLGKFGQRALDFYSIHVTKESTHPVKPLAQIAGNRYASGPVGKALRDACMGTIASFLSKYQDIIIEHQKVVKGNQKRLESLRELAGKENLEYPSVTLPPQPHTKEGVDAYNEVIARVRMWVNLNLWQKLKLSRDDAKPLLRLKGFPSFPLVERQANEVDWWDMVCNVKKLINEKKEDGKVFWQNLAGYKRQEALRPYLSSEEDRKKGKKFARYQLGDLLLHLEKKHGEDWGKVYDEAWERIDKKVEGLSKHIKLEEERRSEDAQSKAALTDWLRAKASFVIEGLKEADKDEFCRCELKLQKWYGDLRGKPFAIEAENSILDISGFSKQYNCAFIWQKDGVKKLNLYLIINYFKGGKLRFKKIKPEAFEANRFYTVINKKSGEIVPMEVNFNFDDPNLIILPLAFGKRQGREFIWNDLLSLETGSLKLANGRVIEKTLYNRRTRQDEPALFVALTFERREVLDSSNIKPMNLIGVDRGENIPAVIALTDPEGCPLSRFKDSLGNPTHILRIGESYKEKQRTIQAKKEVEQRRAGGYSRKYASKAKNLADDMVRNTARDLLYYAVTQDAMLIFENLSRGFGRQGKRTFMAERQYTRMEDWLTAKLAYNGLPSKTYLSKTLAQYTSKTCSNCGFTITSADYDRVLEKLKKTATGWMTTINGKELKVEGQITYYNRYKRQNVVKDLSVELDRLSEESVNNDISSWTKGRSGEALSLLKKRFSHRPVQEKFVCLNCGFETHADEQAALNIARSWLFLRSQEYKKYQTNKTTGNTDKRAFVETWQSFYRKKLKEVWKPAV

SEQ ID NO: 49373 - protein, 978 aa, synthetic construct
  REGION 1..978: note = engineered CasX variant
QEIKRINKIRRRLVKDSNTKKAGKTGPMKTLLVRVMTPDLRERLENLRKKPENIPQPISNTSRANLNKLLTDYTEMKKAILHVYWEEFQKDPVGLMSRVAQPASKKIDQNKLKPEMDEKGNLTTAGFACSQCGQPLFVYKLEQVSEKGKAYTNYVGRCNVAEHEKLIQLAQLKPEKDSDEAVTYSLGKFGQRALDFYSIHVTKESTHPVKPLAQIAGNRYASGPVGKALRDACMGTIASFLSKYQDIIIEHQKVVKGNQKRLESLRELAGKENLEYPSVTLPPQPHTKEGVDAYNEVIARVRMWVNLNLWQKLKLSRDDAKPLLRLKGFPSFPLVERQANEVDWWDMVCNVKKLINEKKEDGKVFWQNLAGYKRQEALRPYLSSEEDRKKGKKFARYQLGDLLLHLEKKHGEDWGKVYDEAWERIDKKVEGLSKHIKLEEERRSEDAQSKAALTDWLRAKASFVIEGLKEADKDEFCRCELKLQKWYGDLRGKPFAIEAENSILDISGFSKQYNCAFIWQKDGVKKLNLYLIINYFKGGKLRFKKIKPEAFEANRFYTVINKKSGEIVPMEVNFNFDDPNLIILPLAFGKRQGREFIWNDLLSLETGSLKLANGRVIEKTLYNRRTRQDEPALFVALTFERREVLDSSNIKPMNLIGVDRGENIPAVIALTDPEGCPLSRFKDSLGNPTHILRIGESYKEKQRTIQAKKEVEQRRAGGYSRKYASKAKNLADDMVRNTARDLLYYAVTQDAMLIFENLSRGFGRQGKRTFMAERQYTRMEDWLTAKLAYEGLPSKTYLSKTLAQYTSKTCSNCGFTITSADYDRVLEKLKKTATGWMTTINGKELKVEGQITYYNRYKRQNVVKDLSVELDRLSEESVNNDISSWTKGRSGEALSLLKKRFSHRPVQEKFVCLNCGFETHADEQAALNIARSWLFLRSQEYKKYQTNKTTGNTDKRAFVETWQSFYRKKLKEVWKPAV

SEQ ID NO: 49374 - protein, 978 aa, synthetic construct
  REGION 1..978: note = engineered CasX variant
QEIKRINKIRRRLVKDSNTKKAGKTGPMKTLLVRVMTPDLRERLENLRKKPENIPQPISNTSRANLNKLLTDYTEMKKAILHVYWEEFQKDPVGLMSRVAQPASKKIDQNKLKPEMDEKGNLTTAGFACSQCGQPLFVYKLEQVSEKGKAYTNYVGRCNVAEHEKLILLAQLKPEKDSDEAVTYSLGKFGQRALDFYSIHVTKESTHPVKPLAQIAGNRYASGPVGKALRDACMGTIASFLSKYQDIIIEHQKVVKGNQKRLESLRELAGKENLEYPSVTLPPQPHTKEGVDAYNEVIARVRMWVNLNLWQKLKLSRDDAKPLLRLKGFPSFPLVERQANEVDWWDMVCNVKKLINEKKEDGKVFWQNLAIYKRQEALRPYLSSEEDRKKGKKFARYQLGDLLLHLEKKHGEDWGKVYDEAWERIDKKVEGLSKHIKLEEERRSEDAQSKAALTDWLRAKASFVIEGLKEADKDEFCRCELKLQKWYGDLRGKPFAIEAENSILDISGFSKQYNCAFIWQKDGVKKLNLYLIINYFKGGKLRFKKIKPEAFEANRFYTVINKKSGEIVPMEVNFNFDDPNLIILPLAFGKRQGREFIWNDLLSLETGSLKLANGRVIEKTLYNRRTRQDEPALFVALTFERREVLDSSNIKPMNLIGVDRGENIPAVIALTDPEGCPLSRFKDSLGNPTHILRIGESYKEKQRTIQAKKEVEQRRAGGYSRKYASKAKNLADDMVRNTARDLLYYAVTQDAMLIFENLSRGFGRQGKRTFMAERQYTRMEDWLTAKLAYEGLPSKTYLSKTLAQYTSKTCSNCGFTITSADYDRVLEKLKKTATGWMTTINGKELKVEGQITYYNRYKRQNVVKDLSVELDRLSEESVNNDISSWTKGRSGEALSLLKKRFSHRPVQEKFVCLNCGFETHADEQAALNIARSWLFLRSQEYKKYQTNKTTGNTDKRAFVETWQSFYRKKLKEVWKPAV

SEQ ID NO: 49375 - protein, 978 aa, synthetic construct
  REGION 1..978: note = engineered CasX variant
QEIKRINKIRRRLVKDSNTKKAGKTGPMKTLLVRVMTPDLRERLENLRKKPENIPQPISNTSRANLNKLLTDYTEMKKAILHVYWEEFQKDPVGLMSRVAQPASKKIDQNKLKPEMDEKGNLTTAGFACSQCGQPLFVYKLEQVSEKGKAYTNYVGRCNVAEHEKLILLAQLKPEKDSDEAVTYSLGKFGQRALDFYSIHVTKESTHPVKPLAQIAGNRYASGPVGKALRDACMGTIASFLSKYQDIIIEHQKVVKGNQKRLESLRELAGKENLEYPSVTLPPQPHTKEGVDAYNEVIARVRMWVNLNLWQKLKLSRDDAKPLLRLKGFPSFPLVERQANEVDWWDMVCNVKKLINEKKEDGKVFWQNLAGYKRQEALRPYLSSEEDREKGKKFARYQLGDLLLHLEKKHGEDWGKVYDEAWERIDKKVEGLSKHIKLEEERRSEDAQSKAALTDWLRAKASFVIEGLKEADKDEFCRCELKLQKWYGDLRGKPFAIEAENSILDISGFSKQYNCAFIWQKDGVKKLNLYLIINYFKGGKLRFKKIKPEAFEANRFYTVINKKSGEIVPMEVNFNFDDPNLIILPLAFGKRQGREFIWNDLLSLETGSLKLANGRVIEKTLYNRRTRQDEPALFVALTFERREVLDSSNIKPMNLIGVDRGENIPAVIALTDPEGCPLSRFKDSLGNPTHILRIGESYKEKQRTIQAKKEVEQRRAGGYSRKYASKAKNLADDMVRNTARDLLYYAVTQDAMLIFENLSRGFGRQGKRTFMAERQYTRMEDWLTAKLAYEGLPSKTYLSKTLAQYTSKTCSNCGFTITSADYDRVLEKLKKTATGWMTTINGKELKVEGQITYYNRYKRQNVVKDLSVELDRLSEESVNNDISSWTKGRSGEALSLLKKRFSHRPVQEKFVCLNCGFETHADEQAALNIARSWLFLRSQEYKKYQTNKTTGNTDKRAFVETWQSFYRKKLKEVWKPAV

SEQ ID NO: 49376 - protein, 978 aa, synthetic construct
  REGION 1..978: note = engineered CasX variant
QEIKRINKIRRRLVKDSNTKKAGKTGPMKTLLVRVMTPDLRERLENLRKKPENIPQPISNTSRANLNKLLTDYTEMKKAILHVYWEEFQKDPVGLMSRVAQPASKKIDQNKLKPEMDEKGNLTTAGFACSQCGQPLFVYKLEQVSEKGKAYTNYVGRCNVAEHEKLILLAQLKPEKDSDEAVTYSLGKFGQRALDFYSIHVTKESTHPVKPLAQIAGNRYASGPVGKALRDACMGTIASFLSKYQDIIIEHQKVVKGNQKRLESLRELAGKENLEYPSVTLPPQPHTKEGVDAYNEVIARVRMWVNLNLWQKLKLSRDDAKPLLRLKGFPSFPLVERQANEVDWWDMVCNVKKLINEKKEDGKVFWQNLAGYKRQEALRPYLSSEEDRKKGKKFARYQLGDLLLHLEKKHGEDWGKVYDEAWERIDKKVEGLSKHIKLEEERRSEDAQSKAALTDWLRAKASFVIEGLKEADKDEFCRCELKLQKWYGDLRGKPFAIEAENSILDISGFSKQYNCAFIWQKDGVKKLNLYLIINYFKGGKLRFKKIKPEAFEANRFYTVINKKSGEIVIMEVNFNFDDPNLIILPLAFGKRQGREFIWNDLLSLETGSLKLANGRVIEKTLYNRRTRQDEPALFVALTFERREVLDSSNIKPMNLIGVDRGENIPAVIALTDPEGCPLSRFKDSLGNPTHILRIGESYKEKQRTIQAKKEVEQRRAGGYSRKYASKAKNLADDMVRNTARDLLYYAVTQDAMLIFENLSRGFGRQGKRTFMAERQYTRMEDWLTAKLAYEGLPSKTYLSKTLAQYTSKTCSNCGFTITSADYDRVLEKLKKTATGWMTTINGKELKVEGQITYYNRYKRQNVVKDLSVELDRLSEESVNNDISSWTKGRSGEALSLLKKRFSHRPVQEKFVCLNCGFETHADEQAALNIARSWLFLRSQEYKKYQTNKTTGNTDKRAFVETWQSFYRKKLKEVWKPAV

SEQ ID NO: 49377 - protein, 978 aa, synthetic construct
  REGION 1..978: note = engineered CasX variant
QEIKRINKIRRRLVKDSNTKKAGKTGPMKTLLVRVMTPDLRERLENLRKKPENIPQPISNTSRANLNKLLTDYTEMKKAILHVYWEEFQKDPVGLMSRVAQPASKKIDQNKLKPEMDEKGNLTTAGFACSQCGQPLFVYKLEQVSEKGKAYTNYFGRCNVAEHEKLILLAQLKPEKDSDEAVTYSLGKFGQRALDFYSIHVTKESTHPVKPLAQIAGNRYASGPVGKALRGACMGTIASFLSKYQDIIIEHQKVVKGNQKRLESLRELAGKENLEYPSVTLPPQPHTKEGVDAYNEVIARVRMWVNLNLWQKLKLSRDDAKPLLRLKGFPSFPLVERQANEVDWWDMVCNVKKLINEKKEDGKVFWQNLAGYKRQEALRPYLSSEEDRKKGKKFARYQLGDLLLHLEKKHGEDWGKVYDEAWERIDKKVEGLSKHIKLEEERRSEDAQSKAALTDWLRAKASFVIEGLKEADKDEFCRCELKLQKWYGDLRGKPFAIEAENSILDISGFSKQYNCAFIWQKDGVKKLNLYLIINYFKGGKLRFKKIKPEAFEANRFYTVINKKSGEIVPMEVNFNFDDPNLIILPLAFGKRQGREFIWNDLLSLETGSLKLANGRVIEKTLYNRRTRQDEPALFVALTFERREVLDSSNIKPMNLIGVDRGENIPAVIALTDPEGCPLSRFKDSLGNPTHILRIGESYKEKQRTIQAKKEVEQRRAGGYSRKYASKAKNLADDMVRNTARDLLYYAVTQDAMLIFENLSRGFGRQGKRTFMAERQYTRMEDWLTAKLAYEGLASKTYLSKTLAQYTSKTCSNCGFTITSADYDRVLEKLKKTATGWMTTINGKELKVEGQITYYNRYKRQNVVKDLSVELDRLSEESVNNDISSWTKGRSGEALSLLKKRFSHRPVQEKFVCLNCGFETHADEQAALNIARSWLFLRSQEYKKYQTNKTTGNTDKRAFVETWQSFYRKKLKEVWKPAV

SEQ ID NO: 49378 - protein, 978 aa, synthetic construct
  REGION 1..978: note = engineered CasX variant
QEIKRINKIRRRLVKDSNTKKAGKTGPMKTLLVRVMTPDLRERLENLRKKPENIPQPISNTSRANLNKLLTDYTEMKKAILHVYWEEFQKDPVGLMSRVAQPASKKIDQNKLKPEMDEKGNLTTAGFACSQCGQPLFVYKLEQVSEKGKAYTNYFGRCNVAEHEKLILLAQLKPEKDSDEAVTYSLGKFGQRALDFYSIHVTKESTHPVKPLAQIAGNRYASGPVGKALRDACMGTIASFLSKYQDIIIEHQKVVKGNQKRLESLRELAGKENLEYPSVTLPPQPHTKEGVDAYNEVIARVRMWVNLNLWQKLKLSRDDAKPLLRLKNFPSFPLVERQANEVDWWDMVCNVKKLINEKKEDGKVFWQNLAGYKRQEALRPYLSSEEDRKKGKKFARYQLGDLLLHLEKKHGEDWGKVYDEAWERIDKKVEGLSKHIKLEEERRSEDAQSKAALTDWLRAKASFVIEGLKEADKDEFCRCELKLQKWYGDLRGKPFAIEAENSILDISGFSKQYNCAFIWQKDGVKKLNLYLIINYFKGGKLRFKKIKPEAFEANRFYTVINKKSGEIVPMEVNFNFDDPNLIILPLAFGKRQGREFIWNDLLSLETGSLKLANGRVIEKTLYNRRTRQDEPALFVALTFERREVLDSSNIKPMNLIGVDRGENIPAVIALTDPEGCPLSRFKDSLGNPTHILRIGESYKEKQRTIQAKKEVEQRRAGGYSRKYASKAKNLADDMVRNTARDLLYYAVTQDAMLIFENLSRGFGRQGKRTFMAERQYTRMEDWLTAKLAYEGLASKTYLSKTLAQYTSKTCSNCGFTITSADYDRVLEKLKKTATGWMTTINGKELKVEGQITYYNRYKRQNVVKDLSVELDRLSEESVNNDISSWTKGRSGEALSLLKKRFSHRPVQEKFVCLNCGFETHADEQAALNIARSWLFLRSQEYKKYQTNKTTGNTDKRAFVETWQSFYRKKLKEVWKPAV

SEQ ID NO: 49379 - protein, 978 aa, synthetic construct
  REGION 1..978: note = engineered CasX variant
QEIKRINKIRRRLVKDSNTKKAGKTGPMKTLLVRVMTPDLRERLENLRKKPENIPQPISNTSRANLNKLLTDYTEMKKAILHVYWEEFQKDPVGLMSRVAQPASKKIDQNKLKPEMDEKGNLTTAGFACSQCGQPLFVYKLEQVSEKGKAYTNYFGRCNVAEHEKLILLAQLKPEKDSDEAVTYSLGKFGQRALDFYSIHVTKESTHPVKPLAQIAGNRYASGPVGKALRDACMGTIASFLSKYQDIIIEHQKVVKGNQKRLESLRELAGKENLEYPSVTLPPQPHTKEGVDAYNEVIARVRMWVNLNLWQKLKLSRDDAKPLLRLKGFPSFPLVERQANEVDWWDMVCNVKKLINEKKEDGKVFWQNLAGYKRQEALRPYLSSEEDRKKGKKFARYQLGDLLNHLEKKHGEDWGKVYDEAWERIDKKVEGLSKHIKLEEERRSEDAQSKAALTDWLRAKASFVIEGLKEADKDEFCRCELKLQKWYGDLRGKPFAIEAENSILDISGFSKQYNCAFIWQKDGVKKLNLYLIINYFKGGKLRFKKIKPEAFEANRFYTVINKKSGEIVPMEVNFNFDDPNLIILPLAFGKRQGREFIWNDLLSLETGSLKLANGRVIEKTLYNRRTRQDEPALFVALTFERREVLDSSNIKPMNLIGVDRGENIPAVIALTDPEGCPLSRFKDSLGNPTHILRIGESYKEKQRTIQAKKEVEQRRAGGYSRKYASKAKNLADDMVRNTARDLLYYAVTQDAMLIFENLSRGFGRQGKRTFMAERQYTRMEDWLTAKLAYEGLASKTYLSKTLAQYTSKTCSNCGFTITSADYDRVLEKLKKTATGWMTTINGKELKVEGQITYYNRYKRQNVVKDLSVELDRLSEESVNNDISSWTKGRSGEALSLLKKRFSHRPVQEKFVCLNCGFETHADEQAALNIARSWLFLRSQEYKKYQTNKTTGNTDKRAFVETWQSFYRKKLKEVWKPAV

SEQ ID NO: 49380 - protein, 978 aa, synthetic construct
  REGION 1..978: note = engineered CasX variant
QEIKRINKIRRRLVKDSNTKKAGKTGPMKTLLVRVMTPDLRERLENLRKKPENIPQPISNTSRANLNKLLTDYTEMKKAILHVYWEEFQKDPVGLMSRVAQPASKKIDQNKLKPEMDEKGNLTTAGFACSQCGQPLFVYKLEQVSEKGKAYTNYFGRCNVAEHEKLILLAQLKPEKDSDEAVTYSLGKFGQRALDFYSIHVTKESTHPVKPLAQIAGNRYASGPVGKALRDACMGTIASFLSKYQDIIIEHQKVVKGNQKRLESLRELAGKENLEYPSVTLPPQPHTKEGVDAYNEVIARVRMWVNLNLWQKLKLSRDDAKPLLRLKGFPSFPLVERQANEVDWWDMVCNVKKLINEKKEDGKVFWQNLAGYKRQEALRPYLSSEEDRKKGKKFARYQLGDLLWHLEKKHGEDWGKVYDEAWERIDKKVEGLSKHIKLEEERRSEDAQSKAALTDWLRAKASFVIEGLKEADKDEFCRCELKLQKWYGDLRGKPFAIEAENSILDISGFSKQYNCAFIWQKDGVKKLNLYLIINYFKGGKLRFKKIKPEAFEANRFYTVINKKSGEIVPMEVNFNFDDPNLIILPLAFGKRQGREFIWNDLLSLETGSLKLANGRVIEKTLYNRRTRQDEPALFVALTFERREVLDSSNIKPMNLIGVDRGENIPAVIALTDPEGCPLSRFKDSLGNPTHILRIGESYKEKQRTIQAKKEVEQRRAGGYSRKYASKAKNLADDMVRNTARDLLYYAVTQDAMLIFENLSRGFGRQGKRTFMAERQYTRMEDWLTAKLAYEGLASKTYLSKTLAQYTSKTCSNCGFTITSADYDRVLEKLKKTATGWMTTINGKELKVEGQITYYNRYKRQNVVKDLSVELDRLSEESVNNDISSWTKGRSGEALSLLKKRFSHRPVQEKFVCLNCGFETHADEQAALNIARSWLFLRSQEYKKYQTNKTTGNTDKRAFVETWQSFYRKKLKEVWKPAV

SEQ ID NO: 49381 - protein, 978 aa, synthetic construct
  REGION 1..978: note = engineered CasX variant
QEIKRINKIRRRLVKDSNTKKAGKTGPMKTLLVRVMTPDLRERLENLRKKPENIPQPISNTSRANLNKLLTDYTEMKKAILHVYWEEFQKDPVGLMSRVAQPASKKIDQNKLKPEMDEKGNLTTAGFACSQCGQPLFVYKLEQVSEKGKAYTNYFGRCNVAEHEKLILLAQLKPEKDSDEAVTYSLGKFGQRALDFYSIHVTKESTHPVKPLAQIAGNRYASGPVGKALRDACMGTIASFLSKYQDIIIEHQKVVKGNQKRLESLRELAGKENLEYPSVTLPPQPHTKEGVDAYNEVIARVRMWVNLNLWQKLKLSRDDAKPLLRLKGFPSFPLVERQANEVDWWDMVCNVKKLINEKKEDGKVFWQNLAGYKRQEALRPYLSSEEDRKKGKKFARYQLGDLLLHLYKKHGEDWGKVYDEAWERIDKKVEGLSKHIKLEEERRSEDAQSKAALTDWLRAKASFVIEGLKEADKDEFCRCELKLQKWYGDLRGKPFAIEAENSILDISGFSKQYNCAFIWQKDGVKKLNLYLIINYFKGGKLRFKKIKPEAFEANRFYTVINKKSGEIVPMEVNFNFDDPNLIILPLAFGKRQGREFIWNDLLSLETGSLKLANGRVIEKTLYNRRTRQDEPALFVALTFERREVLDSSNIKPMNLIGVDRGENIPAVIALTDPEGCPLSRFKDSLGNPTHILRIGESYKEKQRTIQAKKEVEQRRAGGYSRKYASKAKNLADDMVRNTARDLLYYAVTQDAMLIFENLSRGFGRQGKRTFMAERQYTRMEDWLTAKLAYEGLASKTYLSKTLAQYTSKTCSNCGFTITSADYDRVLEKLKKTATGWMTTINGKELKVEGQITYYNRYKRQNVVKDLSVELDRLSEESVNNDISSWTKGRSGEALSLLKKRFSHRPVQEKFVCLNCGFETHADEQAALNIARSWLFLRSQEYKKYQTNKTTGNTDKRAFVETWQSFYRKKLKEVWKPAV

SEQ ID NO: 49382 - protein, 978 aa, synthetic construct
  REGION 1..978: note = engineered CasX variant
QEIKRINKIRRRLVKDSNTKKAGKTGPMKTLLVRVMTPDLRERLENLRKKPENIPQPISNTSRANLNKLLTDYTEMKKAILHVYWEEFQKDPVGLMSRVAQPASKKIDQNKLKPEMDEKGNLTTAGFACSQCGQPLFVYKLEQVSEKGKAYTNYFGRCNVAEHEKLILLAQLKPEKDSDEAVTYSLGKFGQRALDFYSIHVTKESTHPVKPLAQIAGNRYASGPVGKALRDACMGTIASFLSKYQDIIIEHQKVVKGNQKRLESLRELAGKENLEYPSVTLPPQPHTKEGVDAYNEVIARVRMWVNLNLWQKLKLSRDDAKPLLRLKGFPSFPLVERQANEVDWWDMVCNVKKLINEKKEDGKVFWQNLAGYKRQEALRPYLSSEEDRKKGKKFARYQLGDLLLHLEKKHPEDWGKVYDEAWERIDKKVEGLSKHIKLEEERRSEDAQSKAALTDWLRAKASFVIEGLKEADKDEFCRCELKLQKWYGDLRGKPFAIEAENSILDISGFSKQYNCAFIWQKDGVKKLNLYLIINYFKGGKLRFKKIKPEAFEANRFYTVINKKSGEIVPMEVNFNFDDPNLIILPLAFGKRQGREFIWNDLLSLETGSLKLANGRVIEKTLYNRRTRQDEPALFVALTFERREVLDSSNIKPMNLIGVDRGENIPAVIALTDPEGCPLSRFKDSLGNPTHILRIGESYKEKQRTIQAKKEVEQRRAGGYSRKYASKAKNLADDMVRNTARDLLYYAVTQDAMLIFENLSRGFGRQGKRTFMAERQYTRMEDWLTAKLAYEGLASKTYLSKTLAQYTSKTCSNCGFTITSADYDRVLEKLKKTATGWMTTINGKELKVEGQITYYNRYKRQNVVKDLSVELDRLSEESVNNDISSWTKGRSGEALSLLKKRFSHRPVQEKFVCLNCGFETHADEQAALNIARSWLFLRSQEYKKYQTNKTTGNTDKRAFVETWQSFYRKKLKEVWKPAV

SEQ ID NO: 49383 - protein, 979 aa, synthetic construct
  REGION 1..979: note = engineered CasX variant
QEIKRINKIRRRLVKDSNTKKAGKTGPMKTLLVRVMTPDLRERLENLRKKPENIPQPISNTSRANLNKLLTDYTEMKKAILHVYWEEFQKDPVGLMSRVAQPASKKIDQNKLKPEMDEKGNLTTAGFACSQCGQPLFVYKLEQVSEKGKAYTNYFGRCNVAEHEKLILLAQLKPEKDSDEAVTYSLGKFGQRALDFYSIHVTKESTHPVKPLAQIAGNRYASGPVGKALRDACMGTIASFLSKYQDIIIEHQKVVKGNQKRLESLRELAGKENLEYPSVTLPPQPHTKEGVDAYNEVIARVRMWVNLNLWQKLKLSRDDAKPLLRLKGFPSFPLVERQANEVDWWDMVCNVKKLINEKKEDGKVFWQNLAGYKRQEALRPYLSSEEDRKKGKKFARYQLGDLLLHLEKKHGERDWGKVYDEAWERIDKKVEGLSKHIKLEEERRSEDAQSKAALTDWLRAKASFVIEGLKEADKDEFCRCELKLQKWYGDLRGKPFAIEAENSILDISGFSKQYNCAFIWQKDGVKKLNLYLIINYFKGGKLRFKKIKPEAFEANRFYTVINKKSGEIVPMEVNFNFDDPNLIILPLAFGKRQGREFIWNDLLSLETGSLKLANGRVIEKTLYNRRTRQDEPALFVALTFERREVLDSSNIKPMNLIGVDRGENIPAVIALTDPEGCPLSRFKDSLGNPTHILRIGESYKEKQRTIQAKKEVEQRRAGGYSRKYASKAKNLADDMVRNTARDLLYYAVTQDAMLIFENLSRGFGRQGKRTFMAERQYTRMEDWLTAKLAYEGLASKTYLSKTLAQYTSKTCSNCGFTITSADYDRVLEKLKKTATGWMTTINGKELKVEGQITYYNRYKRQNVVKDLSVELDRLSEESVNNDISSWTKGRSGEALSLLKKRFSHRPVQEKFVCLNCGFETHADEQAALNIARSWLFLRSQEYKKYQTNKTTGNTDKRAFVETWQSFYRKKLKEVWKPAV

SEQ ID NO: 49384 - protein, 979 aa, synthetic construct
  REGION 1..979: note = engineered CasX variant
QEIKRINKIRRRLVKDSNTKKAGKTGPMKTLLVRVMTPDLRERLENLRKKPENIPQPISNTSRANLNKLLTDYTEMKKAILHVYWEEFQKDPVGLMSRVAQPASKKIDQNKLKPEMDEKGNLTTAGFACSQCGQPLFVYKLEQVSEKGKAYTNYFGRCNVAEHEKLILLAQLKPEKDSDEAVTYSLGKFGQRALDFYSIHVTKESTHPVKPLAQIAGNRYASGPVGKALRDACMGTIASFLSKYQDIIIEHQKVVKGNQKRLESLRELAGKENLEYPSVTLPPQPHTKEGVDAYNEVIARVRMWVNLNLWQKLKLSRDDAKPLLRLKGFPSFPLVERQANEVDWWDMVCNVKKLINEKKEDGKVFWQNLAGYKRQEALRPYLSSEEDRKKGKKFARYQLGDLLLHLEKKHGEYDWGKVYDEAWERIDKKVEGLSKHIKLEEERRSEDAQSKAALTDWLRAKASFVIEGLKEADKDEFCRCELKLQKWYGDLRGKPFAIEAENSILDISGFSKQYNCAFIWQKDGVKKLNLYLIINYFKGGKLRFKKIKPEAFEANRFYTVINKKSGEIVPMEVNFNFDDPNLIILPLAFGKRQGREFIWNDLLSLETGSLKLANGRVIEKTLYNRRTRQDEPALFVALTFERREVLDSSNIKPMNLIGVDRGENIPAVIALTDPEGCPLSRFKDSLGNPTHILRIGESYKEKQRTIQAKKEVEQRRAGGYSRKYASKAKNLADDMVRNTARDLLYYAVTQDAMLIFENLSRGFGRQGKRTFMAERQYTRMEDWLTAKLAYEGLASKTYLSKTLAQYTSKTCSNCGFTITSADYDRVLEKLKKTATGWMTTINGKELKVEGQITYYNRYKRQNVVKDLSVELDRLSEESVNNDISSWTKGRSGEALSLLKKRFSHRPVQEKFVCLNCGFETHADEQAALNIARSWLFLRSQEYKKYQTNKTTGNTDKRAFVETWQSFYRKKLKEVWKPAV

SEQ ID NO: 49385 - protein, 978 aa, synthetic construct
  REGION 1..978: note = engineered CasX variant
QEIKRINKIRRRLVKDSNTKKAGKTGPMKTLLVRVMTPDLRERLENLRKKPENIPQPISNTSRANLNKLLTDYTEMKKAILHVYWEEFQKDPVGLMSRVAQPASKKIDQNKLKPEMDEKGNLTTAGFACSQCGQPLFVYKLEQVSEKGKAYTNYFGRCNVAEHEKLILLAQLKPEKDSDEAVTYSLGKFGQRALDFYSIHVTKESTHPVKPLAQIAGNRYASGPVGKALRDACMGTIASFLSKYQDIIIEHQKVVKGNQKRLESLRELAGKENLEYPSVTLPPQPHTKEGVDAYNEVIARVRMWVNLNLWQKLKLSRDDAKPLLRLKGFPSFPLVERQANEVDWWDMVCNVKKLINEKKEDGKVFWQNLAGYKRQEALRPYLSSEEDRKKGKKFARYQLGDLLLHLEKKHGEDWGDVYDEAWERIDKKVEGLSKHIKLEEERRSEDAQSKAALTDWLRAKASFVIEGLKEADKDEFCRCELKLQKWYGDLRGKPFAIEAENSILDISGFSKQYNCAFIWQKDGVKKLNLYLIINYFKGGKLRFKKIKPEAFEANRFYTVINKKSGEIVPMEVNFNFDDPNLIILPLAFGKRQGREFIWNDLLSLETGSLKLANGRVIEKTLYNRRTRQDEPALFVALTFERREVLDSSNIKPMNLIGVDRGENIPAVIALTDPEGCPLSRFKDSLGNPTHILRIGESYKEKQRTIQAKKEVEQRRAGGYSRKYASKAKNLADDMVRNTARDLLYYAVTQDAMLIFENLSRGFGRQGKRTFMAERQYTRMEDWLTAKLAYEGLASKTYLSKTLAQYTSKTCSNCGFTITSADYDRVLEKLKKTATGWMTTINGKELKVEGQITYYNRYKRQNVVKDLSVELDRLSEESVNNDISSWTKGRSGEALSLLKKRFSHRPVQEKFVCLNCGFETHADEQAALNIARSWLFLRSQEYKKYQTNKTTGNTDKRAFVETWQSFYRKKLKEVWKPAV

SEQ ID NO: 49386 - protein, 978 aa, synthetic construct
  REGION 1..978: note = engineered CasX variant
QEIKRINKIRRRLVKDSNTKKAGKTGPMKTLLVRVMTPDLRERLENLRKKPENIPQPISNTSRANLNKLLTDYTEMKKAILHVYWEEFQKDPVGLMSRVAQPASKKIDQNKLKPEMDEKGNLTTAGFACSQCGQPLFVYKLEQVSEKGKAYTNYFGRCNVAEHEKLILLAQLKPEKDSDEAVTYSLGKFGQRALDFYSIHVTKESTHPVKPLAQIAGNRYASGPVGKALRDACMGTIASFLSKYQDIIIEHQKVVKGNQKRLESLRELAGKENLEYPSVTLPPQPHTKEGVDAYNEVIARVRMWVNLNLWQKLKLSRDDAKPLLRLKGFPSFPLVERQANEVDWWDMVCNVKKLINEKKEDGKVFWQNLAGYKRQEALRPYLSSEEDRKKGKKFARYQLGDLLLHLEKKHGEDWGKVYGEAWERIDKKVEGLSKHIKLEEERRSEDAQSKAALTDWLRAKASFVIEGLKEADKDEFCRCELKLQKWYGDLRGKPFAIEAENSILDISGFSKQYNCAFIWQKDGVKKLNLYLIINYFKGGKLRFKKIKPEAFEANRFYTVINKKSGEIVPMEVNFNFDDPNLIILPLAFGKRQGREFIWNDLLSLETGSLKLANGRVIEKTLYNRRTRQDEPALFVALTFERREVLDSSNIKPMNLIGVDRGENIPAVIALTDPEGCPLSRFKDSLGNPTHILRIGESYKEKQRTIQAKKEVEQRRAGGYSRKYASKAKNLADDMVRNTARDLLYYAVTQDAMLIFENLSRGFGRQGKRTFMAERQYTRMEDWLTAKLAYEGLASKTYLSKTLAQYTSKTCSNCGFTITSADYDRVLEKLKKTATGWMTTINGKELKVEGQITYYNRYKRQNVVKDLSVELDRLSEESVNNDISSWTKGRSGEALSLLKKRFSHRPVQEKFVCLNCGFETHADEQAALNIARSWLFLRSQEYKKYQTNKTTGNTDKRAFVETWQSFYRKKLKEVWKPAV

SEQ ID NO: 49387 - protein, 978 aa, synthetic construct
  REGION 1..978: note = engineered CasX variant
QEIKRINKIRRRLVKDSNTKKAGKTGPMKTLLVRVMTPDLRERLENLRKKPENIPQPISNTSRANLNKLLTDYTEMKKAILHVYWEEFQKDPVGLMSRVAQPASKKIDQNKLKPEMDEKGNLTTAGFACSQCGQPLFVYKLEQVSEKGKAYTNYFGRCNVAEHEKLILLAQLKPEKDSDEAVTYSLGKFGQRALDFYSIHVTKESTHPVKPLAQIAGNRYASGPVGKALRDACMGTIASFLSKYQDIIIEHQKVVKGNQKRLESLRELAGKENLEYPSVTLPPQPHTKEGVDAYNEVIARVRMWVNLNLWQKLKLSRDDAKPLLRLKGFPSFPLVERQANEVDWWDMVCNVKKLINEKKEDGKVFWQNLAGYKRQEALRPYLSSEEDRKKGKKFARYQLGDLLLHLEKKHGEDWGKVYDEAWERIDKKVEGLSKHIKLEEERRSEDAQSKAALTDWLRAKASFVIEGKKEADKDEFCRCELKLQKWYGDLRGKPFAIEAENSILDISGFSKQYNCAFIWQKDGVKKLNLYLIINYFKGGKLRFKKIKPEAFEANRFYTVINKKSGEIVPMEVNFNFDDPNLIILPLAFGKRQGREFIWNDLLSLETGSLKLANGRVIEKTLYNRRTRQDEPALFVALTFERREVLDSSNIKPMNLIGVDRGENIPAVIALTDPEGCPLSRFKDSLGNPTHILRIGESYKEKQRTIQAKKEVEQRRAGGYSRKYASKAKNLADDMVRNTARDLLYYAVTQDAMLIFENLSRGFGRQGKRTFMAERQYTRMEDWLTAKLAYEGLASKTYLSKTLAQYTSKTCSNCGFTITSADYDRVLEKLKKTATGWMTTINGKELKVEGQITYYNRYKRQNVVKDLSVELDRLSEESVNNDISSWTKGRSGEALSLLKKRFSHRPVQEKFVCLNCGFETHADEQAALNIARSWLFLRSQEYKKYQTNKTTGNTDKRAFVETWQSFYRKKLKEVWKPAV

SEQ ID NO: 49388 - protein, 978 aa, synthetic construct
  REGION 1..978: note = engineered CasX variant
QEIKRINKIRRRLVKDSNTKKAGKTGPMKTLLVRVMTPDLRERLENLRKKPENIPQPISNTSRANLNKLLTDYTEMKKAILHVYWEEFQKDPVGLMSRVAQPASKKIDQNKLKPEMDEKGNLTTAGFACSQCGQPLFVYKLEQVSEKGKAYTNYFGRCNVAEHEKLILLAQLKPEKDSDEAVTYSLGKFGQRALDFYSIHVTKESTHPVKPLAQIAGNRYASGPVGKALRDACMGTIASFLSKYQDIIIEHQKVVKGNQKRLESLRELAGKENLEYPSVTLPPQPHTKEGVDAYNEVIARVRMWVNLNLWQKLKLSRDDAKPLLRLKGFPSFPLVERQANEVDWWDMVCNVKKLINEKKEDGKVFWQNLAGYKRQEALRPYLSSEEDRKKGKKFARYQLGDLLLHLEKKHGEDWGKVYDEAWERIDKKVEGLSKHIKLEEERRSEDAQSKAALTDWLRAKASFVIEGSKEADKDEFCRCELKLQKWYGDLRGKPFAIEAENSILDISGFSKQYNCAFIWQKDGVKKLNLYLIINYFKGGKLRFKKIKPEAFEANRFYTVINKKSGEIVPMEVNFNFDDPNLIILPLAFGKRQGREFIWNDLLSLETGSLKLANGRVIEKTLYNRRTRQDEPALFVALTFERREVLDSSNIKPMNLIGVDRGENIPAVIALTDPEGCPLSRFKDSLGNPTHILRIGESYKEKQRTIQAKKEVEQRRAGGYSRKYASKAKNLADDMVRNTARDLLYYAVTQDAMLIFENLSRGFGRQGKRTFMAERQYTRMEDWLTAKLAYEGLASKTYLSKTLAQYTSKTCSNCGFTITSADYDRVLEKLKKTATGWMTTINGKELKVEGQITYYNRYKRQNVVKDLSVELDRLSEESVNNDISSWTKGRSGEALSLLKKRFSHRPVQEKFVCLNCGFETHADEQAALNIARSWLFLRSQEYKKYQTNKTTGNTDKRAFVETWQSFYRKKLKEVWKPAV

SEQ ID NO: 49389 - protein, 979 aa, synthetic construct
  REGION 1..979: note = engineered CasX variant
QEIKRINKIRRRLVKDSNTKKAGKTGPMKTLLVRVMTPDLRERLENLRKKPENIPQPISNTSRANLNKLLTDYTEMKKAILHVYWEEFQKDPVGLMSRVAQPASKKIDQNKLKPEMDEKGNLTTAGFACSQCGQPLFVYKLEQVSEKGKAYTNYFGRCNVAEHEKLILLAQLKPEKDSDEAVTYSLGKFGQRALDFYSIHVTKESTHPVKPLAQIAGNRYASGPVGKALRDACMGTIASFLSKYQDIIIEHQKVVKGNQKRLESLRELAGKENLEYPSVTLPPQPHTKEGVDAYNEVIARVRMWVNLNLWQKLKLSRDDAKPLLRLKGFPSFPLVERQANEVDWWDMVCNVKKLINEKKEDGKVFWQNLAGYKRQEALRPYLSSEEDRKKGKKFARYQLGDLLLHLEKKHGEDWGKVYDEAWERIDKKVEGLSKHIKLEEERRSEDAQSKAALTDWLRAKASFVIEGLKEADDKDEFCRCELKLQKWYGDLRGKPFAIEAENSILDISGFSKQYNCAFIWQKDGVKKLNLYLIINYFKGGKLRFKKIKPEAFEANRFYTVINKKSGEIVPMEVNFNFDDPNLIILPLAFGKRQGREFIWNDLLSLETGSLKLANGRVIEKTLYNRRTRQDEPALFVALTFERREVLDSSNIKPMNLIGVDRGENIPAVIALTDPEGCPLSRFKDSLGNPTHILRIGESYKEKQRTIQAKKEVEQRRAGGYSRKYASKAKNLADDMVRNTARDLLYYAVTQDAMLIFENLSRGFGRQGKRTFMAERQYTRMEDWLTAKLAYEGLASKTYLSKTLAQYTSKTCSNCGFTITSADYDRVLEKLKKTATGWMTTINGKELKVEGQITYYNRYKRQNVVKDLSVELDRLSEESVNNDISSWTKGRSGEALSLLKKRFSHRPVQEKFVCLNCGFETHADEQAALNIARSWLFLRSQEYKKYQTNKTTGNTDKRAFVETWQSFYRKKLKEVWKPAV

SEQ ID NO: 49390 - protein, 979 aa, synthetic construct
  REGION 1..979: note = engineered CasX variant
QEIKRINKIRRRLVKDSNTKKAGKTGPMKTLLVRVMTPDLRERLENLRKKPENIPQPISNTSRANLNKLLTDYTEMKKAILHVYWEEFQKDPVGLMSRVAQPASKKIDQNKLKPEMDEKGNLTTAGFACSQCGQPLFVYKLEQVSEKGKAYTNYFGRCNVAEHEKLILLAQLKPEKDSDEAVTYSLGKFGQRALDFYSIHVTKESTHPVKPLAQIAGNRYASGPVGKALRDACMGTIASFLSKYQDIIIEHQKVVKGNQKRLESLRELAGKENLEYPSVTLPPQPHTKEGVDAYNEVIARVRMWVNLNLWQKLKLSRDDAKPLLRLKGFPSFPLVERQANEVDWWDMVCNVKKLINEKKEDGKVFWQNLAGYKRQEALRPYLSSEEDRKKGKKFARYQLGDLLLHLEKKHGEDWGKVYDEAWERIDKKVEGLSKHIKLEEERRSEDAQSKAALTDWLRAKASFVIEGLKEADKDEFCRCELKLQKWYGDLRGKPFAIEAENSILDISGFSKQYNCAFIWQKDGVKKLNLYLIINYFKGGKLRFKKIKPEAFEANRFYTVINKKSGEIVPMEVNFNFDDPNLIILPLAFGKRQGREFIWNDLLSLETGSLKLANGRVIEKTLYNRRTRQDEPALFVALTFERREVLDSSNIKPMNLIGVDRGENIPAVIALTDPEGCPLSRFKDSLGNPTHILRIGESYKEKQRTIQAKKEVEQRRAGGYSRKYASKAKNLADDMVRNTARDLLYYAVTQDAMLIFENLSRGFGRQGKRTFMAERQYTRMEDWLTAKLAYEGLASKTYLSKTLAQYTSKTCSNCGFTITSADYDRVLEKLKKTATGWMTTINGKELKVEGQITYYNRYKRQNVVKDLSVELDRLSEESVNNDISSWTKGRSGNEALSLLKKRFSHRPVQEKFVCLNCGFETHADEQAALNIARSWLFLRSQEYKKYQTNKTTGNTDKRAFVETWQSFYRKKLKEVWKPAV

SEQ ID NO: 49391 - protein, 978 aa, synthetic construct
  REGION 1..978: note = engineered CasX variant
QEIKRINKIRRRLVKDSNTKKAGKTGPMKTLLVRVMTPDLRERLENLRKKPENIPQPISNTSRANLNKLLTDYTEMKKAILHVYWEEFQKDPVGLMSRVAQPASKKIDQNKLKPEMDEKGNLTTAGFACSQCGQPLFVYKLEQVSEKGKAYTNYFGRCNVAEHEKLILLAQLKPEKDSDEAVTYSLGKFGQRALDFYSIHVTKESTHPVKPLAQIAGNRYASGPVGKALRDACMGTIASFLSKYQDIIIEHQKVVKGNQKRLESLRELAGKENLEYPSVTLPPQPHTKEGVDAYNEVIARVRMWVNLNLWQKLKLSRDDAKPLLRLKGFPSFPLVERQANEVDWWDMVCNVKKLINEKKEDGKVFWQNLAGYKRQEALRPYLSSEEDRQKGKKFARYQLGDLLLHLEKKHGEDWGKVYDEAWERIDKKVEGLSKHIKLEEERRSEDAQSKAALTDWLRAKASFVIEGLKEADKDEFCRCELKLQKWYGDLRGKPFAIEAENSILDISGFSKQYNCAFIWQKDGVKKLNLYLIINYFKGGKLRFKKIKPEAFEANRFYTVINKKSGEIVPMEVNFNFDDPNLIILPLAFGKRQGREFIWNDLLSLETGSLKLANGRVIEKTLYNRRTRQDEPALFVALTFERREVLDSSNIKPMNLIGVDRGENIPAVIALTDPEGCPLSRFKDSLGNPTHILRIGESYKEKQRTIQAKKEVEQRRAGGYSRKYASKAKNLADDMVRNTARDLLYYAVTQDAMLIFENLSRGFGRQGKRTFMAERQYTRMEDWLTAKLAYEGLASKTYLSKTLAQYTSKTCSNCGFTITSADYDRVLEKLKKTATGWMTTINGKELKVEGQITYYNRYKRQNVVKDLSVELDRLSEESVNNDISSWTKGRSGEALSLLKKRFSHRPVQEKFVCLNCGFETHADEQAALNIARSWLFLRSQEYKKYQTNKTTGNTDKRAFVETWQSFYRKKLKEVWKPAV

SEQ ID NO: 49392 - protein, 978 aa, synthetic construct
  REGION 1..978: note = engineered CasX variant
QEIKRINKIRRRLVKDSNTKKAGKTGPMKTLLVRVMTPDLRERLENLRKKPENIPQPISNTSRANLNKLLTDYTEMKKAILHVYWEEFQKDPVGLMSRVAQPASKKIDQNKLKPEMDEKGNLTTAGFACSQCGQPLFVYKLEQVSEKGKAYTNYFGRCNVAEHEKLILLAQLKPEKDSDEAVTYSLGKFGQRALDFYSIHVTKESTHPVKPLAQIAGNRYASGPVGKALRDACMGTIASFLSKYQDIIIEHQKVVKGNQKRLESLRELAGKENLEYPSVTLPPQPHTKEGVDAYNEVIARVRMWVNLNLWQKLKLSRDDAKPLLRLKGFPSFPLVERQANEVDWWDMVCNVKKLINEKKEDGKVFWQNLAGYKRQEALRPYLSSEEDRKKGKKFARYQLGDLLLHLEKKHGEDWGKVYDEAWERIDKKVEGLSKHIKLEEERRSEDAQSKAALTDWLRAKASFVIEGLKEADKDEFCRCELKLQKWYGDLRGKPFAIEAENSILDISGFSKQYNCAFIWQKDGVKKLNLYLIINYFKGGKLRFKKIKPEAFEANRFYTVINKKSGEIVPMEVNFNFDDPNLIILPLAFGKRQGREFIWNDLLSLETGSLKLANGRVIEKTLYNRRTRQDEPALFVALTFERREVLDSSNIKPMNLIGVDRGENIPAVIALTDPEGCPLSRFKDSLGNPTHILRIGESYKEKQRTIQAKKEVEQRRAGGYSRKYASKAKNLADDMVRNTARDLLYYAVTQDAMLIFENLSRGFGRQGKRTFMAERQYTRMEDWLTAKLAYEGLASQTYLSKTLAQYTSKTCSNCGFTITSADYDRVLEKLKKTATGWMTTINGKELKVEGQITYYNRYKRQNVVKDLSVELDRLSEESVNNDISSWTKGRSGEALSLLKKRFSHRPVQEKFVCLNCGFETHADEQAALNIARSWLFLRSQEYKKYQTNKTTGNTDKRAFVETWQSFYRKKLKEVWKPAV

SEQ ID NO: 49393 - protein, 978 aa, synthetic construct
  REGION 1..978: note = engineered CasX variant
QEIKRINKIRRRLVKDSNTKKAGKTGPMKTLLVRVMTPDLRERLENLRKKPENIPQPISNTSRANLNKLLTDYTEMKKAILHVYWEEFQKDPVGLMSRVAQPASKKIDQNKLKPEMDEKGNLTTAGFACSQCGQPLFVYKLEQVSEKGKAYTNYFGRCNVAEHEKLILLAQLKPEKDSDEAVTYSLGKFGQRALDFYSIHVTKESTHPVKPLAQIAGNRYASGPVGKALRDACMGTIASFLSKYQDIIIEHQKVVKGNQKRLESLRELAGKENLEYPSVTLPPQPHTKEGVDAYNEVIARVRMWVNLNLWQKLKLSRDDAKPLLRLKGFPSFPLVERQANEVDWWDMVCNVKKLINEKKEDGKVFWQNLAGYKRQEALRPYLSSEEDRKKGKKFARYQLGDLLLHLEKKHGEDWGKVYDEAWERIDKKVEGLSKHIKLEEERRSEDAQSKAALTDWLRAKASFVIEGLKEADKDEFCRCELKLQKWYGDLRGKPFAIEAENSILDISGFSKQYNCAFIWQKDGVKKLNLYLIINYFKGGKLRFKKIKPEAFEANRFYTVINKKSGEIVPMEVNFNFDDPNLIILPLAFGKRQGREFIWNDLLSLETGSLKLANGRVIEKTLYNRRTRQDEPALFVALTFERREVLDSSNIKPMNLIGVDRGENIPAVIALTDPEGCPLSRFKDSLGNPTHILRIGESYKEKQRTIQAKKEVEQRRAGGYSRKYASKAKNLADDMVRNTARDLLYYAVTQDAMLIFENLSRGFGRQGKRTFMAERQYTRMEDWLTAKLAYNGLASKTYLSKTLAQYTSKTCSNCGFTITSADYDRVLEKLKKTATGWMTTINGKELKVEGQITYYNRYKRQNVVKDLSVELDRLSEESVNNDISSWTKGRSGEALSLLKKRFSHRPVQEKFVCLNCGFETHADEQAALNIARSWLFLRSQEYKKYQTNKTTGNTDKRAFVETWQSFYRKKLKEVWKPAV

SEQ ID NO: 49394 - protein, 978 aa, synthetic construct
  REGION 1..978: note = engineered CasX variant
QEIKRINKIRRRLVKDSNTKKAGKTGPMKTLLVRVMTPDLRERLENLRKKPENIPQPISNTSRANLNKLLTDYTEMKKAILHVYWEEFQKDPVGLMSRVAQPASKKIDQNKLKPEMDEKGNLTTAGFACSQCGQPLFVYKLEQVSEKGKAYTNYFGRCNVAEHEKLIQLAQLKPEKDSDEAVTYSLGKFGQRALDFYSIHVTKESTHPVKPLAQIAGNRYASGPVGKALRDACMGTIASFLSKYQDIIIEHQKVVKGNQKRLESLRELAGKENLEYPSVTLPPQPHTKEGVDAYNEVIARVRMWVNLNLWQKLKLSRDDAKPLLRLKGFPSFPLVERQANEVDWWDMVCNVKKLINEKKEDGKVFWQNLAGYKRQEALRPYLSSEEDRKKGKKFARYQLGDLLLHLEKKHGEDWGKVYDEAWERIDKKVEGLSKHIKLEEERRSEDAQSKAALTDWLRAKASFVIEGLKEADKDEFCRCELKLQKWYGDLRGKPFAIEAENSILDISGFSKQYNCAFIWQKDGVKKLNLYLIINYFKGGKLRFKKIKPEAFEANRFYTVINKKSGEIVPMEVNFNFDDPNLIILPLAFGKRQGREFIWNDLLSLETGSLKLANGRVIEKTLYNRRTRQDEPALFVALTFERREVLDSSNIKPMNLIGVDRGENIPAVIALTDPEGCPLSRFKDSLGNPTHILRIGESYKEKQRTIQAKKEVEQRRAGGYSRKYASKAKNLADDMVRNTARDLLYYAVTQDAMLIFENLSRGFGRQGKRTFMAERQYTRMEDWLTAKLAYEGLASKTYLSKTLAQYTSKTCSNCGFTITSADYDRVLEKLKKTATGWMTTINGKELKVEGQITYYNRYKRQNVVKDLSVELDRLSEESVNNDISSWTKGRSGEALSLLKKRFSHRPVQEKFVCLNCGFETHADEQAALNIARSWLFLRSQEYKKYQTNKTTGNTDKRAFVETWQSFYRKKLKEVWKPAV

SEQ ID NO: 49395 - protein, 978 aa, synthetic construct
  REGION 1..978: note = engineered CasX variant
QEIKRINKIRRRLVKDSNTKKAGKTGPMKTLLVRVMTPDLRERLENLRKKPENIPQPISNTSRANLNKLLTDYTEMKKAILHVYWEEFQKDPVGLMSRVAQPASKKIDQNKLKPEMDEKGNLTTAGFACSQCGQPLFVYKLEQVSEKGKAYTNYFGRCNVAEHEKLILLAQLKPEKDSDEAVTYSLGKFGQRALDFYSIHVTKESTHPVKPLAQIAGNRYASGPVGKALRDACMGTIASFLSKYQDIIIEHQKVVKGNQKRLESLRELAGKENLEYPSVTLPPQPHTKEGVDAYNEVIARVRMWVNLNLWQKLKLSRDDAKPLLRLKGFPSFPLVERQANEVDWWDMVCNVKKLINEKKEDGKVFWQNLAIYKRQEALRPYLSSEEDRKKGKKFARYQLGDLLLHLEKKHGEDWGKVYDEAWERIDKKVEGLSKHIKLEEERRSEDAQSKAALTDWLRAKASFVIEGLKEADKDEFCRCELKLQKWYGDLRGKPFAIEAENSILDISGFSKQYNCAFIWQKDGVKKLNLYLIINYFKGGKLRFKKIKPEAFEANRFYTVINKKSGEIVPMEVNFNFDDPNLIILPLAFGKRQGREFIWNDLLSLETGSLKLANGRVIEKTLYNRRTRQDEPALFVALTFERREVLDSSNIKPMNLIGVDRGENIPAVIALTDPEGCPLSRFKDSLGNPTHILRIGESYKEKQRTIQAKKEVEQRRAGGYSRKYASKAKNLADDMVRNTARDLLYYAVTQDAMLIFENLSRGFGRQGKRTFMAERQYTRMEDWLTAKLAYEGLASKTYLSKTLAQYTSKTCSNCGFTITSADYDRVLEKLKKTATGWMTTINGKELKVEGQITYYNRYKRQNVVKDLSVELDRLSEESVNNDISSWTKGRSGEALSLLKKRFSHRPVQEKFVCLNCGFETHADEQAALNIARSWLFLRSQEYKKYQTNKTTGNTDKRAFVETWQSFYRKKLKEVWKPAV

SEQ ID NO: 49396 - protein, 978 aa, synthetic construct
  REGION 1..978: note = engineered CasX variant
QEIKRINKIRRRLVKDSNTKKAGKTGPMKTLLVRVMTPDLRERLENLRKKPENIPQPISNTSRANLNKLLTDYTEMKKAILHVYWEEFQKDPVGLMSRVAQPASKKIDQNKLKPEMDEKGNLTTAGFACSQCGQPLFVYKLEQVSEKGKAYTNYFGRCNVAEHEKLILLAQLKPEKDSDEAVTYSLGKFGQRALDFYSIHVTKESTHPVKPLAQIAGNRYASGPVGKALRDACMGTIASFLSKYQDIIIEHQKVVKGNQKRLESLRELAGKENLEYPSVTLPPQPHTKEGVDAYNEVIARVRMWVNLNLWQKLKLSRDDAKPLLRLKGFPSFPLVERQANEVDWWDMVCNVKKLINEKKEDGKVFWQNLAGYKRQEALRPYLSSEEDREKGKKFARYQLGDLLLHLEKKHGEDWGKVYDEAWERIDKKVEGLSKHIKLEEERRSEDAQSKAALTDWLRAKASFVIEGLKEADKDEFCRCELKLQKWYGDLRGKPFAIEAENSILDISGFSKQYNCAFIWQKDGVKKLNLYLIINYFKGGKLRFKKIKPEAFEANRFYTVINKKSGEIVPMEVNFNFDDPNLIILPLAFGKRQGREFIWNDLLSLETGSLKLANGRVIEKTLYNRRTRQDEPALFVALTFERREVLDSSNIKPMNLIGVDRGENIPAVIALTDPEGCPLSRFKDSLGNPTHILRIGESYKEKQRTIQAKKEVEQRRAGGYSRKYASKAKNLADDMVRNTARDLLYYAVTQDAMLIFENLSRGFGRQGKRTFMAERQYTRMEDWLTAKLAYEGLASKTYLSKTLAQYTSKTCSNCGFTITSADYDRVLEKLKKTATGWMTTINGKELKVEGQITYYNRYKRQNVVKDLSVELDRLSEESVNNDISSWTKGRSGEALSLLKKRFSHRPVQEKFVCLNCGFETHADEQAALNIARSWLFLRSQEYKKYQTNKTTGNTDKRAFVETWQSFYRKKLKEVWKPAV

SEQ ID NO: 49397 - protein, 978 aa, synthetic construct
  REGION 1..978: note = engineered CasX variant
QEIKRINKIRRRLVKDSNTKKAGKTGPMKTLLVRVMTPDLRERLENLRKKPENIPQPISNTSRANLNKLLTDYTEMKKAILHVYWEEFQKDPVGLMSRVAQPASKKIDQNKLKPEMDEKGNLTTAGFACSQCGQPLFVYKLEQVSEKGKAYTNYFGRCNVAEHEKLILLAQLKPEKDSDEAVTYSLGKFGQRALDFYSIHVTKESTHPVKPLAQIAGNRYASGPVGKALRDACMGTIASFLSKYQDIIIEHQKVVKGNQKRLESLRELAGKENLEYPSVTLPPQPHTKEGVDAYNEVIARVRMWVNLNLWQKLKLSRDDAKPLLRLKGFPSFPLVERQANEVDWWDMVCNVKKLINEKKEDGKVFWQNLAGYKRQEALRPYLSSEEDRKKGKKFARYQLGDLLLHLEKKHGEDWGKVYDEAWERIDKKVEGLSKHIKLEEERRSEDAQSKAALTDWLRAKASFVIEGLKEADKDEFCRCELKLQKWYGDLRGKPFAIEAENSILDISGFSKQYNCAFIWQKDGVKKLNLYLIINYFKGGKLRFKKIKPEAFEANRFYTVINKKSGEIVIMEVNFNFDDPNLIILPLAFGKRQGREFIWNDLLSLETGSLKLANGRVIEKTLYNRRTRQDEPALFVALTFERREVLDSSNIKPMNLIGVDRGENIPAVIALTDPEGCPLSRFKDSLGNPTHILRIGESYKEKQRTIQAKKEVEQRRAGGYSRKYASKAKNLADDMVRNTARDLLYYAVTQDAMLIFENLSRGFGRQGKRTFMAERQYTRMEDWLTAKLAYEGLASKTYLSKTLAQYTSKTCSNCGFTITSADYDRVLEKLKKTATGWMTTINGKELKVEGQITYYNRYKRQNVVKDLSVELDRLSEESVNNDISSWTKGRSGEALSLLKKRFSHRPVQEKFVCLNCGFETHADEQAALNIARSWLFLRSQEYKKYQTNKTTGNTDKRAFVETWQSFYRKKLKEVWKPAV

SEQ ID NO: 49398 - protein, 978 aa, synthetic construct
  REGION 1..978: note = engineered CasX variant
QEIKRINKIRRRLVKDSNTKKAGKTGPMKTLLVRVMTPDLRERLENLRKKPENIPQPISNTSRANLNKLLTDYTEMKKAILHVYWEEFQKDPVGLMSRVAQPASKKIDQNKLKPEMDEKGNLTTAGFACSQCGQPLFVYKLEQVSEKGKAYTNYFGRCNVAEHEKLILLAQLKPEKDSDEAVTYSLGKFGQRALDFYSIHVTKESTHPVKPLAQIAGNRYASGPVGKALRGACMGTIASFLSKYQDIIIEHQKVVKGNQKRLESLRELAGKENLEYPSVTLPPQPHTKEGVDAYNEVIARVRMWVNLNLWQKLKLSRDDAKPLLRLKGFPSFPLVERQANEVDWWDMVCNVKKLINEKKEDGKVFWQNLAGYKRQEALRPYLSSEEDRKKGKKFARYQLGDLLLHLEKKHGEDWGKVYDEAWERIDKKVEGLSKHIKLEEERRSEDAQSKAALTDWLRAKASFVIEGLKEADKDEFCRCELKLQKWYGDLRGKPFAIEAENSILDISGFSKQYNCAFIWQKDGVKKLNLYLIINYFKGGKLRFKKIKPEAFEANRFYTVINKKSGEIVPMEVNFNFDDPNLIILPLAFGKRQGREFIWNDLLSLETGSLKLANGRVIEKTLYNRRTRQDEPALFVALTFERREVLDSSNIKPMNLIGVDRGENIPAVIALTDPEGCPLSRFKDSLGNPTHILRIGESYKEKQRTIQAKKEVEQRRAGGYSRKYASKAKNLADDMVRNTARDLLYYAVTQDAMLIFENLSRGFGRQGKRTFMAERQYTRMEDWLTAKLAYEGLPSKVYLSKTLAQYTSKTCSNCGFTITSADYDRVLEKLKKTATGWMTTINGKELKVEGQITYYNRYKRQNVVKDLSVELDRLSEESVNNDISSWTKGRSGEALSLLKKRFSHRPVQEKFVCLNCGFETHADEQAALNIARSWLFLRSQEYKKYQTNKTTGNTDKRAFVETWQSFYRKKLKEVWKPAV

SEQ ID NO: 49399 - protein, 978 aa, synthetic construct
  REGION 1..978: note = engineered CasX variant
QEIKRINKIRRRLVKDSNTKKAGKTGPMKTLLVRVMTPDLRERLENLRKKPENIPQPISNTSRANLNKLLTDYTEMKKAILHVYWEEFQKDPVGLMSRVAQPASKKIDQNKLKPEMDEKGNLTTAGFACSQCGQPLFVYKLEQVSEKGKAYTNYFGRCNVAEHEKLILLAQLKPEKDSDEAVTYSLGKFGQRALDFYSIHVTKESTHPVKPLAQIAGNRYASGPVGKALRDACMGTIASFLSKYQDIIIEHQKVVKGNQKRLESLRELAGKENLEYPSVTLPPQPHTKEGVDAYNEVIARVRMWVNLNLWQKLKLSRDDAKPLLRLKNFPSFPLVERQANEVDWWDMVCNVKKLINEKKEDGKVFWQNLAGYKRQEALRPYLSSEEDRKKGKKFARYQLGDLLLHLEKKHGEDWGKVYDEAWERIDKKVEGLSKHIKLEEERRSEDAQSKAALTDWLRAKASFVIEGLKEADKDEFCRCELKLQKWYGDLRGKPFAIEAENSILDISGFSKQYNCAFIWQKDGVKKLNLYLIINYFKGGKLRFKKIKPEAFEANRFYTVINKKSGEIVPMEVNFNFDDPNLIILPLAFGKRQGREFIWNDLLSLETGSLKLANGRVIEKTLYNRRTRQDEPALFVALTFERREVLDSSNIKPMNLIGVDRGENIPAVIALTDPEGCPLSRFKDSLGNPTHILRIGESYKEKQRTIQAKKEVEQRRAGGYSRKYASKAKNLADDMVRNTARDLLYYAVTQDAMLIFENLSRGFGRQGKRTFMAERQYTRMEDWLTAKLAYEGLPSKVYLSKTLAQYTSKTCSNCGFTITSADYDRVLEKLKKTATGWMTTINGKELKVEGQITYYNRYKRQNVVKDLSVELDRLSEESVNNDISSWTKGRSGEALSLLKKRFSHRPVQEKFVCLNCGFETHADEQAALNIARSWLFLRSQEYKKYQTNKTTGNTDKRAFVETWQSFYRKKLKEVWKPAV

SEQ ID NO: 49400 - protein, 978 aa, synthetic construct
  REGION 1..978: note = engineered CasX variant
QEIKRINKIRRRLVKDSNTKKAGKTGPMKTLLVRVMTPDLRERLENLRKKPENIPQPISNTSRANLNKLLTDYTEMKKAILHVYWEEFQKDPVGLMSRVAQPASKKIDQNKLKPEMDEKGNLTTAGFACSQCGQPLFVYKLEQVSEKGKAYTNYFGRCNVAEHEKLILLAQLKPEKDSDEAVTYSLGKFGQRALDFYSIHVTKESTHPVKPLAQIAGNRYASGPVGKALRDACMGTIASFLSKYQDIIIEHQKVVKGNQKRLESLRELAGKENLEYPSVTLPPQPHTKEGVDAYNEVIARVRMWVNLNLWQKLKLSRDDAKPLLRLKGFPSFPLVERQANEVDWWDMVCNVKKLINEKKEDGKVFWQNLAGYKRQEALRPYLSSEEDRKKGKKFARYQLGDLLNHLEKKHGEDWGKVYDEAWERIDKKVEGLSKHIKLEEERRSEDAQSKAALTDWLRAKASFVIEGLKEADKDEFCRCELKLQKWYGDLRGKPFAIEAENSILDISGFSKQYNCAFIWQKDGVKKLNLYLIINYFKGGKLRFKKIKPEAFEANRFYTVINKKSGEIVPMEVNFNFDDPNLIILPLAFGKRQGREFIWNDLLSLETGSLKLANGRVIEKTLYNRRTRQDEPALFVALTFERREVLDSSNIKPMNLIGVDRGENIPAVIALTDPEGCPLSRFKDSLGNPTHILRIGESYKEKQRTIQAKKEVEQRRAGGYSRKYASKAKNLADDMVRNTARDLLYYAVTQDAMLIFENLSRGFGRQGKRTFMAERQYTRMEDWLTAKLAYEGLPSKVYLSKTLAQYTSKTCSNCGFTITSADYDRVLEKLKKTATGWMTTINGKELKVEGQITYYNRYKRQNVVKDLSVELDRLSEESVNNDISSWTKGRSGEALSLLKKRFSHRPVQEKFVCLNCGFETHADEQAALNIARSWLFLRSQEYKKYQTNKTTGNTDKRAFVETWQSFYRKKLKEVWKPAV

SEQ ID NO: 49401 - protein, 978 aa, synthetic construct
  REGION 1..978: note = engineered CasX variant
QEIKRINKIRRRLVKDSNTKKAGKTGPMKTLLVRVMTPDLRERLENLRKKPENIPQPISNTSRANLNKLLTDYTEMKKAILHVYWEEFQKDPVGLMSRVAQPASKKIDQNKLKPEMDEKGNLTTAGFACSQCGQPLFVYKLEQVSEKGKAYTNYFGRCNVAEHEKLILLAQLKPEKDSDEAVTYSLGKFGQRALDFYSIHVTKESTHPVKPLAQIAGNRYASGPVGKALRDACMGTIASFLSKYQDIIIEHQKVVKGNQKRLESLRELAGKENLEYPSVTLPPQPHTKEGVDAYNEVIARVRMWVNLNLWQKLKLSRDDAKPLLRLKGFPSFPLVERQANEVDWWDMVCNVKKLINEKKEDGKVFWQNLAGYKRQEALRPYLSSEEDRKKGKKFARYQLGDLLWHLEKKHGEDWGKVYDEAWERIDKKVEGLSKHIKLEEERRSEDAQSKAALTDWLRAKASFVIEGLKEADKDEFCRCELKLQKWYGDLRGKPFAIEAENSILDISGFSKQYNCAFIWQKDGVKKLNLYLIINYFKGGKLRFKKIKPEAFEANRFYTVINKKSGEIVPMEVNFNFDDPNLIILPLAFGKRQGREFIWNDLLSLETGSLKLANGRVIEKTLYNRRTRQDEPALFVALTFERREVLDSSNIKPMNLIGVDRGENIPAVIALTDPEGCPLSRFKDSLGNPTHILRIGESYKEKQRTIQAKKEVEQRRAGGYSRKYASKAKNLADDMVRNTARDLLYYAVTQDAMLIFENLSRGFGRQGKRTFMAERQYTRMEDWLTAKLAYEGLPSKVYLSKTLAQYTSKTCSNCGFTITSADYDRVLEKLKKTATGWMTTINGKELKVEGQITYYNRYKRQNVVKDLSVELDRLSEESVNNDISSWTKGRSGEALSLLKKRFSHRPVQEKFVCLNCGFETHADEQAALNIARSWLFLRSQEYKKYQTNKTTGNTDKRAFVETWQSFYRKKLKEVWKPAV

SEQ ID NO: 49402 - protein, 978 aa, synthetic construct
  REGION 1..978: note = engineered CasX variant
QEIKRINKIRRRLVKDSNTKKAGKTGPMKTLLVRVMTPDLRERLENLRKKPENIPQPISNTSRANLNKLLTDYTEMKKAILHVYWEEFQKDPVGLMSRVAQPASKKIDQNKLKPEMDEKGNLTTAGFACSQCGQPLFVYKLEQVSEKGKAYTNYFGRCNVAEHEKLILLAQLKPEKDSDEAVTYSLGKFGQRALDFYSIHVTKESTHPVKPLAQIAGNRYASGPVGKALRDACMGTIASFLSKYQDIIIEHQKVVKGNQKRLESLRELAGKENLEYPSVTLPPQPHTKEGVDAYNEVIARVRMWVNLNLWQKLKLSRDDAKPLLRLKGFPSFPLVERQANEVDWWDMVCNVKKLINEKKEDGKVFWQNLAGYKRQEALRPYLSSEEDRKKGKKFARYQLGDLLLHLYKKHGEDWGKVYDEAWERIDKKVEGLSKHIKLEEERRSEDAQSKAALTDWLRAKASFVIEGLKEADKDEFCRCELKLQKWYGDLRGKPFAIEAENSILDISGFSKQYNCAFIWQKDGVKKLNLYLIINYFKGGKLRFKKIKPEAFEANRFYTVINKKSGEIVPMEVNFNFDDPNLIILPLAFGKRQGREFIWNDLLSLETGSLKLANGRVIEKTLYNRRTRQDEPALFVALTFERREVLDSSNIKPMNLIGVDRGENIPAVIALTDPEGCPLSRFKDSLGNPTHILRIGESYKEKQRTIQAKKEVEQRRAGGYSRKYASKAKNLADDMVRNTARDLLYYAVTQDAMLIFENLSRGFGRQGKRTFMAERQYTRMEDWLTAKLAYEGLPSKVYLSKTLAQYTSKTCSNCGFTITSADYDRVLEKLKKTATGWMTTINGKELKVEGQITYYNRYKRQNVVKDLSVELDRLSEESVNNDISSWTKGRSGEALSLLKKRFSHRPVQEKFVCLNCGFETHADEQAALNIARSWLFLRSQEYKKYQTNKTTGNTDKRAFVETWQSFYRKKLKEVWKPAV

SEQ ID NO: 49403 - protein, 978 aa, synthetic construct
  REGION 1..978: note = engineered CasX variant
QEIKRINKIRRRLVKDSNTKKAGKTGPMKTLLVRVMTPDLRERLENLRKKPENIPQPISNTSRANLNKLLTDYTEMKKAILHVYWEEFQKDPVGLMSRVAQPASKKIDQNKLKPEMDEKGNLTTAGFACSQCGQPLFVYKLEQVSEKGKAYTNYFGRCNVAEHEKLILLAQLKPEKDSDEAVTYSLGKFGQRALDFYSIHVTKESTHPVKPLAQIAGNRYASGPVGKALRDACMGTIASFLSKYQDIIIEHQKVVKGNQKRLESLRELAGKENLEYPSVTLPPQPHTKEGVDAYNEVIARVRMWVNLNLWQKLKLSRDDAKPLLRLKGFPSFPLVERQANEVDWWDMVCNVKKLINEKKEDGKVFWQNLAGYKRQEALRPYLSSEEDRKKGKKFARYQLGDLLLHLEKKHPEDWGKVYDEAWERIDKKVEGLSKHIKLEEERRSEDAQSKAALTDWLRAKASFVIEGLKEADKDEFCRCELKLQKWYGDLRGKPFAIEAENSILDISGFSKQYNCAFIWQKDGVKKLNLYLIINYFKGGKLRFKKIKPEAFEANRFYTVINKKSGEIVPMEVNFNFDDPNLIILPLAFGKRQGREFIWNDLLSLETGSLKLANGRVIEKTLYNRRTRQDEPALFVALTFERREVLDSSNIKPMNLIGVDRGENIPAVIALTDPEGCPLSRFKDSLGNPTHILRIGESYKEKQRTIQAKKEVEQRRAGGYSRKYASKAKNLADDMVRNTARDLLYYAVTQDAMLIFENLSRGFGRQGKRTFMAERQYTRMEDWLTAKLAYEGLPSKVYLSKTLAQYTSKTCSNCGFTITSADYDRVLEKLKKTATGWMTTINGKELKVEGQITYYNRYKRQNVVKDLSVELDRLSEESVNNDISSWTKGRSGEALSLLKKRFSHRPVQEKFVCLNCGFETHADEQAALNIARSWLFLRSQEYKKYQTNKTTGNTDKRAFVETWQSFYRKKLKEVWKPAV

SEQ ID NO: 49404 - protein, 979 aa, synthetic construct
  REGION 1..979: note = engineered CasX variant
QEIKRINKIRRRLVKDSNTKKAGKTGPMKTLLVRVMTPDLRERLENLRKKPENIPQPISNTSRANLNKLLTDYTEMKKAILHVYWEEFQKDPVGLMSRVAQPASKKIDQNKLKPEMDEKGNLTTAGFACSQCGQPLFVYKLEQVSEKGKAYTNYFGRCNVAEHEKLILLAQLKPEKDSDEAVTYSLGKFGQRALDFYSIHVTKESTHPVKPLAQIAGNRYASGPVGKALRDACMGTIASFLSKYQDIIIEHQKVVKGNQKRLESLRELAGKENLEYPSVTLPPQPHTKEGVDAYNEVIARVRMWVNLNLWQKLKLSRDDAKPLLRLKGFPSFPLVERQANEVDWWDMVCNVKKLINEKKEDGKVFWQNLAGYKRQEALRPYLSSEEDRKKGKKFARYQLGDLLLHLEKKHGERDWGKVYDEAWERIDKKVEGLSKHIKLEEERRSEDAQSKAALTDWLRAKASFVIEGLKEADKDEFCRCELKLQKWYGDLRGKPFAIEAENSILDISGFSKQYNCAFIWQKDGVKKLNLYLIINYFKGGKLRFKKIKPEAFEANRFYTVINKKSGEIVPMEVNFNFDDPNLIILPLAFGKRQGREFIWNDLLSLETGSLKLANGRVIEKTLYNRRTRQDEPALFVALTFERREVLDSSNIKPMNLIGVDRGENIPAVIALTDPEGCPLSRFKDSLGNPTHILRIGESYKEKQRTIQAKKEVEQRRAGGYSRKYASKAKNLADDMVRNTARDLLYYAVTQDAMLIFENLSRGFGRQGKRTFMAERQYTRMEDWLTAKLAYEGLPSKVYLSKTLAQYTSKTCSNCGFTITSADYDRVLEKLKKTATGWMTTINGKELKVEGQITYYNRYKRQNVVKDLSVELDRLSEESVNNDISSWTKGRSGEALSLLKKRFSHRPVQEKFVCLNCGFETHADEQAALNIARSWLFLRSQEYKKYQTNKTTGNTDKRAFVETWQSFYRKKLKEVWKPAV

SEQ ID NO: 49405 - protein, 979 aa, synthetic construct
  REGION 1..979: note = engineered CasX variant
QEIKRINKIRRRLVKDSNTKKAGKTGPMKTLLVRVMTPDLRERLENLRKKPENIPQPISNTSRANLNKLLTDYTEMKKAILHVYWEEFQKDPVGLMSRVAQPASKKIDQNKLKPEMDEKGNLTTAGFACSQCGQPLFVYKLEQVSEKGKAYTNYFGRCNVAEHEKLILLAQLKPEKDSDEAVTYSLGKFGQRALDFYSIHVTKESTHPVKPLAQIAGNRYASGPVGKALRDACMGTIASFLSKYQDIIIEHQKVVKGNQKRLESLRELAGKENLEYPSVTLPPQPHTKEGVDAYNEVIARVRMWVNLNLWQKLKLSRDDAKPLLRLKGFPSFPLVERQANEVDWWDMVCNVKKLINEKKEDGKVFWQNLAGYKRQEALRPYLSSEEDRKKGKKFARYQLGDLLLHLEKKHGEYDWGKVYDEAWERIDKKVEGLSKHIKLEEERRSEDAQSKAALTDWLRAKASFVIEGLKEADKDEFCRCELKLQKWYGDLRGKPFAIEAENSILDISGFSKQYNCAFIWQKDGVKKLNLYLIINYFKGGKLRFKKIKPEAFEANRFYTVINKKSGEIVPMEVNFNFDDPNLIILPLAFGKRQGREFIWNDLLSLETGSLKLANGRVIEKTLYNRRTRQDEPALFVALTFERREVLDSSNIKPMNLIGVDRGENIPAVIALTDPEGCPLSRFKDSLGNPTHILRIGESYKEKQRTIQAKKEVEQRRAGGYSRKYASKAKNLADDMVRNTARDLLYYAVTQDAMLIFENLSRGFGRQGKRTFMAERQYTRMEDWLTAKLAYEGLPSKVYLSKTLAQYTSKTCSNCGFTITSADYDRVLEKLKKTATGWMTTINGKELKVEGQITYYNRYKRQNVVKDLSVELDRLSEESVNNDISSWTKGRSGEALSLLKKRFSHRPVQEKFVCLNCGFETHADEQAALNIARSWLFLRSQEYKKYQTNKTTGNTDKRAFVETWQSFYRKKLKEVWKPAV

SEQ ID NO: 49406 - protein, 978 aa, synthetic construct
  REGION 1..978: note = engineered CasX variant
QEIKRINKIRRRLVKDSNTKKAGKTGPMKTLLVRVMTPDLRERLENLRKKPENIPQPISNTSRANLNKLLTDYTEMKKAILHVYWEEFQKDPVGLMSRVAQPASKKIDQNKLKPEMDEKGNLTTAGFACSQCGQPLFVYKLEQVSEKGKAYTNYFGRCNVAEHEKLILLAQLKPEKDSDEAVTYSLGKFGQRALDFYSIHVTKESTHPVKPLAQIAGNRYASGPVGKALRDACMGTIASFLSKYQDIIIEHQKVVKGNQKRLESLRELAGKENLEYPSVTLPPQPHTKEGVDAYNEVIARVRMWVNLNLWQKLKLSRDDAKPLLRLKGFPSFPLVERQANEVDWWDMVCNVKKLINEKKEDGKVFWQNLAGYKRQEALRPYLSSEEDRKKGKKFARYQLGDLLLHLEKKHGEDWGDVYDEAWERIDKKVEGLSKHIKLEEERRSEDAQSKAALTDWLRAKASFVIEGLKEADKDEFCRCELKLQKWYGDLRGKPFAIEAENSILDISGFSKQYNCAFIWQKDGVKKLNLYLIINYFKGGKLRFKKIKPEAFEANRFYTVINKKSGEIVPMEVNFNFDDPNLIILPLAFGKRQGREFIWNDLLSLETGSLKLANGRVIEKTLYNRRTRQDEPALFVALTFERREVLDSSNIKPMNLIGVDRGENIPAVIALTDPEGCPLSRFKDSLGNPTHILRIGESYKEKQRTIQAKKEVEQRRAGGYSRKYASKAKNLADDMVRNTARDLLYYAVTQDAMLIFENLSRGFGRQGKRTFMAERQYTRMEDWLTAKLAYEGLPSKVYLSKTLAQYTSKTCSNCGFTITSADYDRVLEKLKKTATGWMTTINGKELKVEGQITYYNRYKRQNVVKDLSVELDRLSEESVNNDISSWTKGRSGEALSLLKKRFSHRPVQEKFVCLNCGFETHADEQAALNIARSWLFLRSQEYKKYQTNKTTGNTDKRAFVETWQSFYRKKLKEVWKPAV

SEQ ID NO: 49407 - protein, 978 aa, synthetic construct
  REGION 1..978: note = engineered CasX variant
QEIKRINKIRRRLVKDSNTKKAGKTGPMKTLLVRVMTPDLRERLENLRKKPENIPQPISNTSRANLNKLLTDYTEMKKAILHVYWEEFQKDPVGLMSRVAQPASKKIDQNKLKPEMDEKGNLTTAGFACSQCGQPLFVYKLEQVSEKGKAYTNYFGRCNVAEHEKLILLAQLKPEKDSDEAVTYSLGKFGQRALDFYSIHVTKESTHPVKPLAQIAGNRYASGPVGKALRDACMGTIASFLSKYQDIIIEHQKVVKGNQKRLESLRELAGKENLEYPSVTLPPQPHTKEGVDAYNEVIARVRMWVNLNLWQKLKLSRDDAKPLLRLKGFPSFPLVERQANEVDWWDMVCNVKKLINEKKEDGKVFWQNLAGYKRQEALRPYLSSEEDRKKGKKFARYQLGDLLLHLEKKHGEDWGKVYGEAWERIDKKVEGLSKHIKLEEERRSEDAQSKAALTDWLRAKASFVIEGLKEADKDEFCRCELKLQKWYGDLRGKPFAIEAENSILDISGFSKQYNCAFIWQKDGVKKLNLYLIINYFKGGKLRFKKIKPEAFEANRFYTVINKKSGEIVPMEVNFNFDDPNLIILPLAFGKRQGREFIWNDLLSLETGSLKLANGRVIEKTLYNRRTRQDEPALFVALTFERREVLDSSNIKPMNLIGVDRGENIPAVIALTDPEGCPLSRFKDSLGNPTHILRIGESYKEKQRTIQAKKEVEQRRAGGYSRKYASKAKNLADDMVRNTARDLLYYAVTQDAMLIFENLSRGFGRQGKRTFMAERQYTRMEDWLTAKLAYEGLPSKVYLSKTLAQYTSKTCSNCGFTITSADYDRVLEKLKKTATGWMTTINGKELKVEGQITYYNRYKRQNVVKDLSVELDRLSEESVNNDISSWTKGRSGEALSLLKKRFSHRPVQEKFVCLNCGFETHADEQAALNIARSWLFLRSQEYKKYQTNKTTGNTDKRAFVETWQSFYRKKLKEVWKPAV

SEQ ID NO: 49408 - protein, 978 aa, synthetic construct
  REGION 1..978: note = engineered CasX variant
QEIKRINKIRRRLVKDSNTKKAGKTGPMKTLLVRVMTPDLRERLENLRKKPENIPQPISNTSRANLNKLLTDYTEMKKAILHVYWEEFQKDPVGLMSRVAQPASKKIDQNKLKPEMDEKGNLTTAGFACSQCGQPLFVYKLEQVSEKGKAYTNYFGRCNVAEHEKLILLAQLKPEKDSDEAVTYSLGKFGQRALDFYSIHVTKESTHPVKPLAQIAGNRYASGPVGKALRDACMGTIASFLSKYQDIIIEHQKVVKGNQKRLESLRELAGKENLEYPSVTLPPQPHTKEGVDAYNEVIARVRMWVNLNLWQKLKLSRDDAKPLLRLKGFPSFPLVERQANEVDWWDMVCNVKKLINEKKEDGKVFWQNLAGYKRQEALRPYLSSEEDRKKGKKFARYQLGDLLLHLEKKHGEDWGKVYDEAWERIDKKVEGLSKHIKLEEERRSEDAQSKAALTDWLRAKASFVIEGKKEADKDEFCRCELKLQKWYGDLRGKPFAIEAENSILDISGFSKQYNCAFIWQKDGVKKLNLYLIINYFKGGKLRFKKIKPEAFEANRFYTVINKKSGEIVPMEVNFNFDDPNLIILPLAFGKRQGREFIWNDLLSLETGSLKLANGRVIEKTLYNRRTRQDEPALFVALTFERREVLDSSNIKPMNLIGVDRGENIPAVIALTDPEGCPLSRFKDSLGNPTHILRIGESYKEKQRTIQAKKEVEQRRAGGYSRKYASKAKNLADDMVRNTARDLLYYAVTQDAMLIFENLSRGFGRQGKRTFMAERQYTRMEDWLTAKLAYEGLPSKVYLSKTLAQYTSKTCSNCGFTITSADYDRVLEKLKKTATGWMTTINGKELKVEGQITYYNRYKRQNVVKDLSVELDRLSEESVNNDISSWTKGRSGEALSLLKKRFSHRPVQEKFVCLNCGFETHADEQAALNIARSWLFLRSQEYKKYQTNKTTGNTDKRAFVETWQSFYRKKLKEVWKPAV

SEQ ID NO: 49409 - protein, 978 aa, synthetic construct
  REGION 1..978: note = engineered CasX variant
QEIKRINKIRRRLVKDSNTKKAGKTGPMKTLLVRVMTPDLRERLENLRKKPENIPQPISNTSRANLNKLLTDYTEMKKAILHVYWEEFQKDPVGLMSRVAQPASKKIDQNKLKPEMDEKGNLTTAGFACSQCGQPLFVYKLEQVSEKGKAYTNYFGRCNVAEHEKLILLAQLKPEKDSDEAVTYSLGKFGQRALDFYSIHVTKESTHPVKPLAQIAGNRYASGPVGKALRDACMGTIASFLSKYQDIIIEHQKVVKGNQKRLESLRELAGKENLEYPSVTLPPQPHTKEGVDAYNEVIARVRMWVNLNLWQKLKLSRDDAKPLLRLKGFPSFPLVERQANEVDWWDMVCNVKKLINEKKEDGKVFWQNLAGYKRQEALRPYLSSEEDRKKGKKFARYQLGDLLLHLEKKHGEDWGKVYDEAWERIDKKVEGLSKHIKLEEERRSEDAQSKAALTDWLRAKASFVIEGSKEADKDEFCRCELKLQKWYGDLRGKPFAIEAENSILDISGFSKQYNCAFIWQKDGVKKLNLYLIINYFKGGKLRFKKIKPEAFEANRFYTVINKKSGEIVPMEVNFNFDDPNLIILPLAFGKRQGREFIWNDLLSLETGSLKLANGRVIEKTLYNRRTRQDEPALFVALTFERREVLDSSNIKPMNLIGVDRGENIPAVIALTDPEGCPLSRFKDSLGNPTHILRIGESYKEKQRTIQAKKEVEQRRAGGYSRKYASKAKNLADDMVRNTARDLLYYAVTQDAMLIFENLSRGFGRQGKRTFMAERQYTRMEDWLTAKLAYEGLPSKVYLSKTLAQYTSKTCSNCGFTITSADYDRVLEKLKKTATGWMTTINGKELKVEGQITYYNRYKRQNVVKDLSVELDRLSEESVNNDISSWTKGRSGEALSLLKKRFSHRPVQEKFVCLNCGFETHADEQAALNIARSWLFLRSQEYKKYQTNKTTGNTDKRAFVETWQSFYRKKLKEVWKPAV

SEQ ID NO: 49410 - protein, 979 aa, synthetic construct
  REGION 1..979: note = engineered CasX variant
QEIKRINKIRRRLVKDSNTKKAGKTGPMKTLLVRVMTPDLRERLENLRKKPENIPQPISNTSRANLNKLLTDYTEMKKAILHVYWEEFQKDPVGLMSRVAQPASKKIDQNKLKPEMDEKGNLTTAGFACSQCGQPLFVYKLEQVSEKGKAYTNYFGRCNVAEHEKLILLAQLKPEKDSDEAVTYSLGKFGQRALDFYSIHVTKESTHPVKPLAQIAGNRYASGPVGKALRDACMGTIASFLSKYQDIIIEHQKVVKGNQKRLESLRELAGKENLEYPSVTLPPQPHTKEGVDAYNEVIARVRMWVNLNLWQKLKLSRDDAKPLLRLKGFPSFPLVERQANEVDWWDMVCNVKKLINEKKEDGKVFWQNLAGYKRQEALRPYLSSEEDRKKGKKFARYQLGDLLLHLEKKHGEDWGKVYDEAWERIDKKVEGLSKHIKLEEERRSEDAQSKAALTDWLRAKASFVIEGLKEADDKDEFCRCELKLQKWYGDLRGKPFAIEAENSILDISGFSKQYNCAFIWQKDGVKKLNLYLIINYFKGGKLRFKKIKPEAFEANRFYTVINKKSGEIVPMEVNFNFDDPNLIILPLAFGKRQGREFIWNDLLSLETGSLKLANGRVIEKTLYNRRTRQDEPALFVALTFERREVLDSSNIKPMNLIGVDRGENIPAVIALTDPEGCPLSRFKDSLGNPTHILRIGESYKEKQRTIQAKKEVEQRRAGGYSRKYASKAKNLADDMVRNTARDLLYYAVTQDAMLIFENLSRGFGRQGKRTFMAERQYTRMEDWLTAKLAYEGLPSKVYLSKTLAQYTSKTCSNCGFTITSADYDRVLEKLKKTATGWMTTINGKELKVEGQITYYNRYKRQNVVKDLSVELDRLSEESVNNDISSWTKGRSGEALSLLKKRFSHRPVQEKFVCLNCGFETHADEQAALNIARSWLFLRSQEYKKYQTNKTTGNTDKRAFVETWQSFYRKKLKEVWKPAV

SEQ ID NO: 49411 - protein, 979 aa, synthetic construct
  REGION 1..979: note = engineered CasX variant
QEIKRINKIRRRLVKDSNTKKAGKTGPMKTLLVRVMTPDLRERLENLRKKPENIPQPISNTSRANLNKLLTDYTEMKKAILHVYWEEFQKDPVGLMSRVAQPASKKIDQNKLKPEMDEKGNLTTAGFACSQCGQPLFVYKLEQVSEKGKAYTNYFGRCNVAEHEKLILLAQLKPEKDSDEAVTYSLGKFGQRALDFYSIHVTKESTHPVKPLAQIAGNRYASGPVGKALRDACMGTIASFLSKYQDIIIEHQKVVKGNQKRLESLRELAGKENLEYPSVTLPPQPHTKEGVDAYNEVIARVRMWVNLNLWQKLKLSRDDAKPLLRLKGFPSFPLVERQANEVDWWDMVCNVKKLINEKKEDGKVFWQNLAGYKRQEALRPYLSSEEDRKKGKKFARYQLGDLLLHLEKKHGEDWGKVYDEAWERIDKKVEGLSKHIKLEEERRSEDAQSKAALTDWLRAKASFVIEGLKEADKDEFCRCELKLQKWYGDLRGKPFAIEAENSILDISGFSKQYNCAFIWQKDGVKKLNLYLIINYFKGGKLRFKKIKPEAFEANRFYTVINKKSGEIVPMEVNFNFDDPNLIILPLAFGKRQGREFIWNDLLSLETGSLKLANGRVIEKTLYNRRTRQDEPALFVALTFERREVLDSSNIKPMNLIGVDRGENIPAVIALTDPEGCPLSRFKDSLGNPTHILRIGESYKEKQRTIQAKKEVEQRRAGGYSRKYASKAKNLADDMVRNTARDLLYYAVTQDAMLIFENLSRGFGRQGKRTFMAERQYTRMEDWLTAKLAYEGLPSKVYLSKTLAQYTSKTCSNCGFTITSADYDRVLEKLKKTATGWMTTINGKELKVEGQITYYNRYKRQNVVKDLSVELDRLSEESVNNDISSWTKGRSGNEALSLLKKRFSHRPVQEKFVCLNCGFETHADEQAALNIARSWLFLRSQEYKKYQTNKTTGNTDKRAFVETWQSFYRKKLKEVWKPAV

SEQ ID NO: 49412 - protein, 978 aa, synthetic construct
  REGION 1..978: note = engineered CasX variant
QEIKRINKIRRRLVKDSNTKKAGKTGPMKTLLVRVMTPDLRERLENLRKKPENIPQPISNTSRANLNKLLTDYTEMKKAILHVYWEEFQKDPVGLMSRVAQPASKKIDQNKLKPEMDEKGNLTTAGFACSQCGQPLFVYKLEQVSEKGKAYTNYFGRCNVAEHEKLILLAQLKPEKDSDEAVTYSLGKFGQRALDFYSIHVTKESTHPVKPLAQIAGNRYASGPVGKALRDACMGTIASFLSKYQDIIIEHQKVVKGNQKRLESLRELAGKENLEYPSVTLPPQPHTKEGVDAYNEVIARVRMWVNLNLWQKLKLSRDDAKPLLRLKGFPSFPLVERQANEVDWWDMVCNVKKLINEKKEDGKVFWQNLAGYKRQEALRPYLSSEEDRQKGKKFARYQLGDLLLHLEKKHGEDWGKVYDEAWERIDKKVEGLSKHIKLEEERRSEDAQSKAALTDWLRAKASFVIEGLKEADKDEFCRCELKLQKWYGDLRGKPFAIEAENSILDISGFSKQYNCAFIWQKDGVKKLNLYLIINYFKGGKLRFKKIKPEAFEANRFYTVINKKSGEIVPMEVNFNFDDPNLIILPLAFGKRQGREFIWNDLLSLETGSLKLANGRVIEKTLYNRRTRQDEPALFVALTFERREVLDSSNIKPMNLIGVDRGENIPAVIALTDPEGCPLSRFKDSLGNPTHILRIGESYKEKQRTIQAKKEVEQRRAGGYSRKYASKAKNLADDMVRNTARDLLYYAVTQDAMLIFENLSRGFGRQGKRTFMAERQYTRMEDWLTAKLAYEGLPSKVYLSKTLAQYTSKTCSNCGFTITSADYDRVLEKLKKTATGWMTTINGKELKVEGQITYYNRYKRQNVVKDLSVELDRLSEESVNNDISSWTKGRSGEALSLLKKRFSHRPVQEKFVCLNCGFETHADEQAALNIARSWLFLRSQEYKKYQTNKTTGNTDKRAFVETWQSFYRKKLKEVWKPAV

SEQ ID NO: 49413 - protein, 978 aa, synthetic construct
  REGION 1..978: note = engineered CasX variant
QEIKRINKIRRRLVKDSNTKKAGKTGPMKTLLVRVMTPDLRERLENLRKKPENIPQPISNTSRANLNKLLTDYTEMKKAILHVYWEEFQKDPVGLMSRVAQPASKKIDQNKLKPEMDEKGNLTTAGFACSQCGQPLFVYKLEQVSEKGKAYTNYFGRCNVAEHEKLILLAQLKPEKDSDEAVTYSLGKFGQRALDFYSIHVTKESTHPVKPLAQIAGNRYASGPVGKALRDACMGTIASFLSKYQDIIIEHQKVVKGNQKRLESLRELAGKENLEYPSVTLPPQPHTKEGVDAYNEVIARVRMWVNLNLWQKLKLSRDDAKPLLRLKGFPSFPLVERQANEVDWWDMVCNVKKLINEKKEDGKVFWQNLAGYKRQEALRPYLSSEEDRKKGKKFARYQLGDLLLHLEKKHGEDWGKVYDEAWERIDKKVEGLSKHIKLEEERRSEDAQSKAALTDWLRAKASFVIEGLKEADKDEFCRCELKLQKWYGDLRGKPFAIEAENSILDISGFSKQYNCAFIWQKDGVKKLNLYLIINYFKGGKLRFKKIKPEAFEANRFYTVINKKSGEIVPMEVNFNFDDPNLIILPLAFGKRQGREFIWNDLLSLETGSLKLANGRVIEKTLYNRRTRQDEPALFVALTFERREVLDSSNIKPMNLIGVDRGENIPAVIALTDPEGCPLSRFKDSLGNPTHILRIGESYKEKQRTIQAKKEVEQRRAGGYSRKYASKAKNLADDMVRNTARDLLYYAVTQDAMLIFENLSRGFGRQGKRTFMAERQYTRMEDWLTAKLAYEGLPSQVYLSKTLAQYTSKTCSNCGFTITSADYDRVLEKLKKTATGWMTTINGKELKVEGQITYYNRYKRQNVVKDLSVELDRLSEESVNNDISSWTKGRSGEALSLLKKRFSHRPVQEKFVCLNCGFETHADEQAALNIARSWLFLRSQEYKKYQTNKTTGNTDKRAFVETWQSFYRKKLKEVWKPAV

SEQ ID NO: 49414 - protein, 978 aa, synthetic construct
  REGION 1..978: note = engineered CasX variant
QEIKRINKIRRRLVKDSNTKKAGKTGPMKTLLVRVMTPDLRERLENLRKKPENIPQPISNTSRANLNKLLTDYTEMKKAILHVYWEEFQKDPVGLMSRVAQPASKKIDQNKLKPEMDEKGNLTTAGFACSQCGQPLFVYKLEQVSEKGKAYTNYFGRCNVAEHEKLILLAQLKPEKDSDEAVTYSLGKFGQRALDFYSIHVTKESTHPVKPLAQIAGNRYASGPVGKALRDACMGTIASFLSKYQDIIIEHQKVVKGNQKRLESLRELAGKENLEYPSVTLPPQPHTKEGVDAYNEVIARVRMWVNLNLWQKLKLSRDDAKPLLRLKGFPSFPLVERQANEVDWWDMVCNVKKLINEKKEDGKVFWQNLAGYKRQEALRPYLSSEEDRKKGKKFARYQLGDLLLHLEKKHGEDWGKVYDEAWERIDKKVEGLSKHIKLEEERRSEDAQSKAALTDWLRAKASFVIEGLKEADKDEFCRCELKLQKWYGDLRGKPFAIEAENSILDISGFSKQYNCAFIWQKDGVKKLNLYLIINYFKGGKLRFKKIKPEAFEANRFYTVINKKSGEIVPMEVNFNFDDPNLIILPLAFGKRQGREFIWNDLLSLETGSLKLANGRVIEKTLYNRRTRQDEPALFVALTFERREVLDSSNIKPMNLIGVDRGENIPAVIALTDPEGCPLSRFKDSLGNPTHILRIGESYKEKQRTIQAKKEVEQRRAGGYSRKYASKAKNLADDMVRNTARDLLYYAVTQDAMLIFENLSRGFGRQGKRTFMAERQYTRMEDWLTAKLAYNGLPSKVYLSKTLAQYTSKTCSNCGFTITSADYDRVLEKLKKTATGWMTTINGKELKVEGQITYYNRYKRQNVVKDLSVELDRLSEESVNNDISSWTKGRSGEALSLLKKRFSHRPVQEKFVCLNCGFETHADEQAALNIARSWLFLRSQEYKKYQTNKTTGNTDKRAFVETWQSFYRKKLKEVWKPAV

SEQ ID NO: 49415 - protein, 978 aa, synthetic construct
  REGION 1..978: note = engineered CasX variant
QEIKRINKIRRRLVKDSNTKKAGKTGPMKTLLVRVMTPDLRERLENLRKKPENIPQPISNTSRANLNKLLTDYTEMKKAILHVYWEEFQKDPVGLMSRVAQPASKKIDQNKLKPEMDEKGNLTTAGFACSQCGQPLFVYKLEQVSEKGKAYTNYFGRCNVAEHEKLIQLAQLKPEKDSDEAVTYSLGKFGQRALDFYSIHVTKESTHPVKPLAQIAGNRYASGPVGKALRDACMGTIASFLSKYQDIIIEHQKVVKGNQKRLESLRELAGKENLEYPSVTLPPQPHTKEGVDAYNEVIARVRMWVNLNLWQKLKLSRDDAKPLLRLKGFPSFPLVERQANEVDWWDMVCNVKKLINEKKEDGKVFWQNLAGYKRQEALRPYLSSEEDRKKGKKFARYQLGDLLLHLEKKHGEDWGKVYDEAWERIDKKVEGLSKHIKLEEERRSEDAQSKAALTDWLRAKASFVIEGLKEADKDEFCRCELKLQKWYGDLRGKPFAIEAENSILDISGFSKQYNCAFIWQKDGVKKLNLYLIINYFKGGKLRFKKIKPEAFEANRFYTVINKKSGEIVPMEVNFNFDDPNLIILPLAFGKRQGREFIWNDLLSLETGSLKLANGRVIEKTLYNRRTRQDEPALFVALTFERREVLDSSNIKPMNLIGVDRGENIPAVIALTDPEGCPLSRFKDSLGNPTHILRIGESYKEKQRTIQAKKEVEQRRAGGYSRKYASKAKNLADDMVRNTARDLLYYAVTQDAMLIFENLSRGFGRQGKRTFMAERQYTRMEDWLTAKLAYEGLPSKVYLSKTLAQYTSKTCSNCGFTITSADYDRVLEKLKKTATGWMTTINGKELKVEGQITYYNRYKRQNVVKDLSVELDRLSEESVNNDISSWTKGRSGEALSLLKKRFSHRPVQEKFVCLNCGFETHADEQAALNIARSWLFLRSQEYKKYQTNKTTGNTDKRAFVETWQSFYRKKLKEVWKPAV

SEQ ID NO: 49416 - protein, 978 aa, synthetic construct
  REGION 1..978: note = engineered CasX variant
QEIKRINKIRRRLVKDSNTKKAGKTGPMKTLLVRVMTPDLRERLENLRKKPENIPQPISNTSRANLNKLLTDYTEMKKAILHVYWEEFQKDPVGLMSRVAQPASKKIDQNKLKPEMDEKGNLTTAGFACSQCGQPLFVYKLEQVSEKGKAYTNYFGRCNVAEHEKLILLAQLKPEKDSDEAVTYSLGKFGQRALDFYSIHVTKESTHPVKPLAQIAGNRYASGPVGKALRDACMGTIASFLSKYQDIIIEHQKVVKGNQKRLESLRELAGKENLEYPSVTLPPQPHTKEGVDAYNEVIARVRMWVNLNLWQKLKLSRDDAKPLLRLKGFPSFPLVERQANEVDWWDMVCNVKKLINEKKEDGKVFWQNLAIYKRQEALRPYLSSEEDRKKGKKFARYQLGDLLLHLEKKHGEDWGKVYDEAWERIDKKVEGLSKHIKLEEERRSEDAQSKAALTDWLRAKASFVIEGLKEADKDEFCRCELKLQKWYGDLRGKPFAIEAENSILDISGFSKQYNCAFIWQKDGVKKLNLYLIINYFKGGKLRFKKIKPEAFEANRFYTVINKKSGEIVPMEVNFNFDDPNLIILPLAFGKRQGREFIWNDLLSLETGSLKLANGRVIEKTLYNRRTRQDEPALFVALTFERREVLDSSNIKPMNLIGVDRGENIPAVIALTDPEGCPLSRFKDSLGNPTHILRIGESYKEKQRTIQAKKEVEQRRAGGYSRKYASKAKNLADDMVRNTARDLLYYAVTQDAMLIFENLSRGFGRQGKRTFMAERQYTRMEDWLTAKLAYEGLPSKVYLSKTLAQYTSKTCSNCGFTITSADYDRVLEKLKKTATGWMTTINGKELKVEGQITYYNRYKRQNVVKDLSVELDRLSEESVNNDISSWTKGRSGEALSLLKKRFSHRPVQEKFVCLNCGFETHADEQAALNIARSWLFLRSQEYKKYQTNKTTGNTDKRAFVETWQSFYRKKLKEVWKPAV

SEQ ID NO: 49417 - protein, 978 aa, synthetic construct
  REGION 1..978: note = engineered CasX variant
QEIKRINKIRRRLVKDSNTKKAGKTGPMKTLLVRVMTPDLRERLENLRKKPENIPQPISNTSRANLNKLLTDYTEMKKAILHVYWEEFQKDPVGLMSRVAQPASKKIDQNKLKPEMDEKGNLTTAGFACSQCGQPLFVYKLEQVSEKGKAYTNYFGRCNVAEHEKLILLAQLKPEKDSDEAVTYSLGKFGQRALDFYSIHVTKESTHPVKPLAQIAGNRYASGPVGKALRDACMGTIASFLSKYQDIIIEHQKVVKGNQKRLESLRELAGKENLEYPSVTLPPQPHTKEGVDAYNEVIARVRMWVNLNLWQKLKLSRDDAKPLLRLKGFPSFPLVERQANEVDWWDMVCNVKKLINEKKEDGKVFWQNLAGYKRQEALRPYLSSEEDREKGKKFARYQLGDLLLHLEKKHGEDWGKVYDEAWERIDKKVEGLSKHIKLEEERRSEDAQSKAALTDWLRAKASFVIEGLKEADKDEFCRCELKLQKWYGDLRGKPFAIEAENSILDISGFSKQYNCAFIWQKDGVKKLNLYLIINYFKGGKLRFKKIKPEAFEANRFYTVINKKSGEIVPMEVNFNFDDPNLIILPLAFGKRQGREFIWNDLLSLETGSLKLANGRVIEKTLYNRRTRQDEPALFVALTFERREVLDSSNIKPMNLIGVDRGENIPAVIALTDPEGCPLSRFKDSLGNPTHILRIGESYKEKQRTIQAKKEVEQRRAGGYSRKYASKAKNLADDMVRNTARDLLYYAVTQDAMLIFENLSRGFGRQGKRTFMAERQYTRMEDWLTAKLAYEGLPSKVYLSKTLAQYTSKTCSNCGFTITSADYDRVLEKLKKTATGWMTTINGKELKVEGQITYYNRYKRQNVVKDLSVELDRLSEESVNNDISSWTKGRSGEALSLLKKRFSHRPVQEKFVCLNCGFETHADEQAALNIARSWLFLRSQEYKKYQTNKTTGNTDKRAFVETWQSFYRKKLKEVWKPAV

SEQ ID NO: 49418 - protein, 978 aa, synthetic construct
  REGION 1..978: note = engineered CasX variant
QEIKRINKIRRRLVKDSNTKKAGKTGPMKTLLVRVMTPDLRERLENLRKKPENIPQPISNTSRANLNKLLTDYTEMKKAILHVYWEEFQKDPVGLMSRVAQPASKKIDQNKLKPEMDEKGNLTTAGFACSQCGQPLFVYKLEQVSEKGKAYTNYFGRCNVAEHEKLILLAQLKPEKDSDEAVTYSLGKFGQRALDFYSIHVTKESTHPVKPLAQIAGNRYASGPVGKALRDACMGTIASFLSKYQDIIIEHQKVVKGNQKRLESLRELAGKENLEYPSVTLPPQPHTKEGVDAYNEVIARVRMWVNLNLWQKLKLSRDDAKPLLRLKGFPSFPLVERQANEVDWWDMVCNVKKLINEKKEDGKVFWQNLAGYKRQEALRPYLSSEEDRKKGKKFARYQLGDLLLHLEKKHGEDWGKVYDEAWERIDKKVEGLSKHIKLEEERRSEDAQSKAALTDWLRAKASFVIEGLKEADKDEFCRCELKLQKWYGDLRGKPFAIEAENSILDISGFSKQYNCAFIWQKDGVKKLNLYLIINYFKGGKLRFKKIKPEAFEANRFYTVINKKSGEIVIMEVNFNFDDPNLIILPLAFGKRQGREFIWNDLLSLETGSLKLANGRVIEKTLYNRRTRQDEPALFVALTFERREVLDSSNIKPMNLIGVDRGENIPAVIALTDPEGCPLSRFKDSLGNPTHILRIGESYKEKQRTIQAKKEVEQRRAGGYSRKYASKAKNLADDMVRNTARDLLYYAVTQDAMLIFENLSRGFGRQGKRTFMAERQYTRMEDWLTAKLAYEGLPSKVYLSKTLAQYTSKTCSNCGFTITSADYDRVLEKLKKTATGWMTTINGKELKVEGQITYYNRYKRQNVVKDLSVELDRLSEESVNNDISSWTKGRSGEALSLLKKRFSHRPVQEKFVCLNCGFETHADEQAALNIARSWLFLRSQEYKKYQTNKTTGNTDKRAFVETWQSFYRKKLKEVWKPAV

SEQ ID NO: 49419 - protein, 979 aa, synthetic construct
  REGION 1..979: note = engineered CasX variant
QEIKRINKIRRRLVKDSNTKKAGKTGPMKTLLVRVMTPDLRERLENLRKKPENIPQPISNTSRANLNKLLTDYTEMKKAILHVYWEEFQKDPVGLMSRVAQPASKKIDQNKLKPEMDEKGNLTTAGFACSQCGQPLFVYKLEQVSEKGKAYTNYFGRCNVAEHEKLILLAQLKPEKDSDEAVTYSLGKFGQRALDFYSIHVTKESTHPVKPLAQIAGNRYASGPVGKALRGACMGTIASFLSKYQDIIIEHQKVVKGNQKRLESLRELAGKENLEYPSVTLPPQPHTKEGVDAYNEVIARVRMWVNLNLWQKLKLSRDDAKPLLRLKGFPSFPLVERQANEVDWWDMVCNVKKLINEKKEDGKVFWQNLAGYKRQEALRPYLSSEEDRKKGKKFARYQLGDLLLHLEKKHGEDWGKVYDEAWERIDKKVEGLSKHIKLEEERRSEDAQSKAALTDWLRAKASFVIEGLKEADKDEFCRCELKLQKWYGDLRGKPFAIEAENSILDISGFSKQYNCAFIWQKDGVKKLNLYLIINYFKGGKLRFKKIKPEAFEANRFYTVINKKSGEIVPMEVNFNFDDPNLIILPLAFGKRQGREFIWNDLLSLETGSLKLANGRVIEKTLYNRRTRQDEPALFVALTFERREVLDSSNIKPMNLIGVDRGENIPAVIALTDPEGCPLSRFKDSLGNPTHILRIGESYKEKQRTIQAKKEVEQRRAGGYSRKYASKAKNLADDMVRNTARDLLYYAVTQDAMLIFENLSRGFGRQGKRTFMAERQYTRMEDWLTAKLAYEGPLPSKTYLSKTLAQYTSKTCSNCGFTITSADYDRVLEKLKKTATGWMTTINGKELKVEGQITYYNRYKRQNVVKDLSVELDRLSEESVNNDISSWTKGRSGEALSLLKKRFSHRPVQEKFVCLNCGFETHADEQAALNIARSWLFLRSQEYKKYQTNKTTGNTDKRAFVETWQSFYRKKLKEVWKPAV

SEQ ID NO: 49420 - protein, 979 aa, synthetic construct
  REGION 1..979: note = engineered CasX variant
QEIKRINKIRRRLVKDSNTKKAGKTGPMKTLLVRVMTPDLRERLENLRKKPENIPQPISNTSRANLNKLLTDYTEMKKAILHVYWEEFQKDPVGLMSRVAQPASKKIDQNKLKPEMDEKGNLTTAGFACSQCGQPLFVYKLEQVSEKGKAYTNYFGRCNVAEHEKLILLAQLKPEKDSDEAVTYSLGKFGQRALDFYSIHVTKESTHPVKPLAQIAGNRYASGPVGKALRDACMGTIASFLSKYQDIIIEHQKVVKGNQKRLESLRELAGKENLEYPSVTLPPQPHTKEGVDAYNEVIARVRMWVNLNLWQKLKLSRDDAKPLLRLKNFPSFPLVERQANEVDWWDMVCNVKKLINEKKEDGKVFWQNLAGYKRQEALRPYLSSEEDRKKGKKFARYQLGDLLLHLEKKHGEDWGKVYDEAWERIDKKVEGLSKHIKLEEERRSEDAQSKAALTDWLRAKASFVIEGLKEADKDEFCRCELKLQKWYGDLRGKPFAIEAENSILDISGFSKQYNCAFIWQKDGVKKLNLYLIINYFKGGKLRFKKIKPEAFEANRFYTVINKKSGEIVPMEVNFNFDDPNLIILPLAFGKRQGREFIWNDLLSLETGSLKLANGRVIEKTLYNRRTRQDEPALFVALTFERREVLDSSNIKPMNLIGVDRGENIPAVIALTDPEGCPLSRFKDSLGNPTHILRIGESYKEKQRTIQAKKEVEQRRAGGYSRKYASKAKNLADDMVRNTARDLLYYAVTQDAMLIFENLSRGFGRQGKRTFMAERQYTRMEDWLTAKLAYEGPLPSKTYLSKTLAQYTSKTCSNCGFTITSADYDRVLEKLKKTATGWMTTINGKELKVEGQITYYNRYKRQNVVKDLSVELDRLSEESVNNDISSWTKGRSGEALSLLKKRFSHRPVQEKFVCLNCGFETHADEQAALNIARSWLFLRSQEYKKYQTNKTTGNTDKRAFVETWQSFYRKKLKEVWKPAV

SEQ ID NO: 49421 - protein, 979 aa, synthetic construct
  REGION 1..979: note = engineered CasX variant
QEIKRINKIRRRLVKDSNTKKAGKTGPMKTLLVRVMTPDLRERLENLRKKPENIPQPISNTSRANLNKLLTDYTEMKKAILHVYWEEFQKDPVGLMSRVAQPASKKIDQNKLKPEMDEKGNLTTAGFACSQCGQPLFVYKLEQVSEKGKAYTNYFGRCNVAEHEKLILLAQLKPEKDSDEAVTYSLGKFGQRALDFYSIHVTKESTHPVKPLAQIAGNRYASGPVGKALRDACMGTIASFLSKYQDIIIEHQKVVKGNQKRLESLRELAGKENLEYPSVTLPPQPHTKEGVDAYNEVIARVRMWVNLNLWQKLKLSRDDAKPLLRLKGFPSFPLVERQANEVDWWDMVCNVKKLINEKKEDGKVFWQNLAGYKRQEALRPYLSSEEDRKKGKKFARYQLGDLLNHLEKKHGEDWGKVYDEAWERIDKKVEGLSKHIKLEEERRSEDAQSKAALTDWLRAKASFVIEGLKEADKDEFCRCELKLQKWYGDLRGKPFAIEAENSILDISGFSKQYNCAFIWQKDGVKKLNLYLIINYFKGGKLRFKKIKPEAFEANRFYTVINKKSGEIVPMEVNFNFDDPNLIILPLAFGKRQGREFIWNDLLSLETGSLKLANGRVIEKTLYNRRTRQDEPALFVALTFERREVLDSSNIKPMNLIGVDRGENIPAVIALTDPEGCPLSRFKDSLGNPTHILRIGESYKEKQRTIQAKKEVEQRRAGGYSRKYASKAKNLADDMVRNTARDLLYYAVTQDAMLIFENLSRGFGRQGKRTFMAERQYTRMEDWLTAKLAYEGPLPSKTYLSKTLAQYTSKTCSNCGFTITSADYDRVLEKLKKTATGWMTTINGKELKVEGQITYYNRYKRQNVVKDLSVELDRLSEESVNNDISSWTKGRSGEALSLLKKRFSHRPVQEKFVCLNCGFETHADEQAALNIARSWLFLRSQEYKKYQTNKTTGNTDKRAFVETWQSFYRKKLKEVWKPAV

SEQ ID NO: 49422 - protein, 979 aa, synthetic construct
  REGION 1..979: note = engineered CasX variant
QEIKRINKIRRRLVKDSNTKKAGKTGPMKTLLVRVMTPDLRERLENLRKKPENIPQPISNTSRANLNKLLTDYTEMKKAILHVYWEEFQKDPVGLMSRVAQPASKKIDQNKLKPEMDEKGNLTTAGFACSQCGQPLFVYKLEQVSEKGKAYTNYFGRCNVAEHEKLILLAQLKPEKDSDEAVTYSLGKFGQRALDFYSIHVTKESTHPVKPLAQIAGNRYASGPVGKALRDACMGTIASFLSKYQDIIIEHQKVVKGNQKRLESLRELAGKENLEYPSVTLPPQPHTKEGVDAYNEVIARVRMWVNLNLWQKLKLSRDDAKPLLRLKGFPSFPLVERQANEVDWWDMVCNVKKLINEKKEDGKVFWQNLAGYKRQEALRPYLSSEEDRKKGKKFARYQLGDLLWHLEKKHGEDWGKVYDEAWERIDKKVEGLSKHIKLEEERRSEDAQSKAALTDWLRAKASFVIEGLKEADKDEFCRCELKLQKWYGDLRGKPFAIEAENSILDISGFSKQYNCAFIWQKDGVKKLNLYLIINYFKGGKLRFKKIKPEAFEANRFYTVINKKSGEIVPMEVNFNFDDPNLIILPLAFGKRQGREFIWNDLLSLETGSLKLANGRVIEKTLYNRRTRQDEPALFVALTFERREVLDSSNIKPMNLIGVDRGENIPAVIALTDPEGCPLSRFKDSLGNPTHILRIGESYKEKQRTIQAKKEVEQRRAGGYSRKYASKAKNLADDMVRNTARDLLYYAVTQDAMLIFENLSRGFGRQGKRTFMAERQYTRMEDWLTAKLAYEGPLPSKTYLSKTLAQYTSKTCSNCGFTITSADYDRVLEKLKKTATGWMTTINGKELKVEGQITYYNRYKRQNVVKDLSVELDRLSEESVNNDISSWTKGRSGEALSLLKKRFSHRPVQEKFVCLNCGFETHADEQAALNIARSWLFLRSQEYKKYQTNKTTGNTDKRAFVETWQSFYRKKLKEVWKPAV

SEQ ID NO: 49423 - protein, 979 aa, synthetic construct
  REGION 1..979: note = engineered CasX variant
QEIKRINKIRRRLVKDSNTKKAGKTGPMKTLLVRVMTPDLRERLENLRKKPENIPQPISNTSRANLNKLLTDYTEMKKAILHVYWEEFQKDPVGLMSRVAQPASKKIDQNKLKPEMDEKGNLTTAGFACSQCGQPLFVYKLEQVSEKGKAYTNYFGRCNVAEHEKLILLAQLKPEKDSDEAVTYSLGKFGQRALDFYSIHVTKESTHPVKPLAQIAGNRYASGPVGKALRDACMGTIASFLSKYQDIIIEHQKVVKGNQKRLESLRELAGKENLEYPSVTLPPQPHTKEGVDAYNEVIARVRMWVNLNLWQKLKLSRDDAKPLLRLKGFPSFPLVERQANEVDWWDMVCNVKKLINEKKEDGKVFWQNLAGYKRQEALRPYLSSEEDRKKGKKFARYQLGDLLLHLYKKHGEDWGKVYDEAWERIDKKVEGLSKHIKLEEERRSEDAQSKAALTDWLRAKASFVIEGLKEADKDEFCRCELKLQKWYGDLRGKPFAIEAENSILDISGFSKQYNCAFIWQKDGVKKLNLYLIINYFKGGKLRFKKIKPEAFEANRFYTVINKKSGEIVPMEVNFNFDDPNLIILPLAFGKRQGREFIWNDLLSLETGSLKLANGRVIEKTLYNRRTRQDEPALFVALTFERREVLDSSNIKPMNLIGVDRGENIPAVIALTDPEGCPLSRFKDSLGNPTHILRIGESYKEKQRTIQAKKEVEQRRAGGYSRKYASKAKNLADDMVRNTARDLLYYAVTQDAMLIFENLSRGFGRQGKRTFMAERQYTRMEDWLTAKLAYEGPLPSKTYLSKTLAQYTSKTCSNCGFTITSADYDRVLEKLKKTATGWMTTINGKELKVEGQITYYNRYKRQNVVKDLSVELDRLSEESVNNDISSWTKGRSGEALSLLKKRFSHRPVQEKFVCLNCGFETHADEQAALNIARSWLFLRSQEYKKYQTNKTTGNTDKRAFVETWQSFYRKKLKEVWKPAV

SEQ ID NO: 49424 - protein, 979 aa, synthetic construct
  REGION 1..979: note = engineered CasX variant
QEIKRINKIRRRLVKDSNTKKAGKTGPMKTLLVRVMTPDLRERLENLRKKPENIPQPISNTSRANLNKLLTDYTEMKKAILHVYWEEFQKDPVGLMSRVAQPASKKIDQNKLKPEMDEKGNLTTAGFACSQCGQPLFVYKLEQVSEKGKAYTNYFGRCNVAEHEKLILLAQLKPEKDSDEAVTYSLGKFGQRALDFYSIHVTKESTHPVKPLAQIAGNRYASGPVGKALRDACMGTIASFLSKYQDIIIEHQKVVKGNQKRLESLRELAGKENLEYPSVTLPPQPHTKEGVDAYNEVIARVRMWVNLNLWQKLKLSRDDAKPLLRLKGFPSFPLVERQANEVDWWDMVCNVKKLINEKKEDGKVFWQNLAGYKRQEALRPYLSSEEDRKKGKKFARYQLGDLLLHLEKKHPEDWGKVYDEAWERIDKKVEGLSKHIKLEEERRSEDAQSKAALTDWLRAKASFVIEGLKEADKDEFCRCELKLQKWYGDLRGKPFAIEAENSILDISGFSKQYNCAFIWQKDGVKKLNLYLIINYFKGGKLRFKKIKPEAFEANRFYTVINKKSGEIVPMEVNFNFDDPNLIILPLAFGKRQGREFIWNDLLSLETGSLKLANGRVIEKTLYNRRTRQDEPALFVALTFERREVLDSSNIKPMNLIGVDRGENIPAVIALTDPEGCPLSRFKDSLGNPTHILRIGESYKEKQRTIQAKKEVEQRRAGGYSRKYASKAKNLADDMVRNTARDLLYYAVTQDAMLIFENLSRGFGRQGKRTFMAERQYTRMEDWLTAKLAYEGPLPSKTYLSKTLAQYTSKTCSNCGFTITSADYDRVLEKLKKTATGWMTTINGKELKVEGQITYYNRYKRQNVVKDLSVELDRLSEESVNNDISSWTKGRSGEALSLLKKRFSHRPVQEKFVCLNCGFETHADEQAALNIARSWLFLRSQEYKKYQTNKTTGNTDKRAFVETWQSFYRKKLKEVWKPAV

SEQ ID NO: 49425 - protein, 980 aa, synthetic construct
  REGION 1..980: note = engineered CasX variant
QEIKRINKIRRRLVKDSNTKKAGKTGPMKTLLVRVMTPDLRERLENLRKKPENIPQPISNTSRANLNKLLTDYTEMKKAILHVYWEEFQKDPVGLMSRVAQPASKKIDQNKLKPEMDEKGNLTTAGFACSQCGQPLFVYKLEQVSEKGKAYTNYFGRCNVAEHEKLILLAQLKPEKDSDEAVTYSLGKFGQRALDFYSIHVTKESTHPVKPLAQIAGNRYASGPVGKALRDACMGTIASFLSKYQDIIIEHQKVVKGNQKRLESLRELAGKENLEYPSVTLPPQPHTKEGVDAYNEVIARVRMWVNLNLWQKLKLSRDDAKPLLRLKGFPSFPLVERQANEVDWWDMVCNVKKLINEKKEDGKVFWQNLAGYKRQEALRPYLSSEEDRKKGKKFARYQLGDLLLHLEKKHGERDWGKVYDEAWERIDKKVEGLSKHIKLEEERRSEDAQSKAALTDWLRAKASFVIEGLKEADKDEFCRCELKLQKWYGDLRGKPFAIEAENSILDISGFSKQYNCAFIWQKDGVKKLNLYLIINYFKGGKLRFKKIKPEAFEANRFYTVINKKSGEIVPMEVNFNFDDPNLIILPLAFGKRQGREFIWNDLLSLETGSLKLANGRVIEKTLYNRRTRQDEPALFVALTFERREVLDSSNIKPMNLIGVDRGENIPAVIALTDPEGCPLSRFKDSLGNPTHILRIGESYKEKQRTIQAKKEVEQRRAGGYSRKYASKAKNLADDMVRNTARDLLYYAVTQDAMLIFENLSRGFGRQGKRTFMAERQYTRMEDWLTAKLAYEGPLPSKTYLSKTLAQYTSKTCSNCGFTITSADYDRVLEKLKKTATGWMTTINGKELKVEGQITYYNRYKRQNVVKDLSVELDRLSEESVNNDISSWTKGRSGEALSLLKKRFSHRPVQEKFVCLNCGFETHADEQAALNIARSWLFLRSQEYKKYQTNKTTGNTDKRAFVETWQSFYRKKLKEVWKPAV

SEQ ID NO: 49426 - protein, 980 aa, synthetic construct
  REGION 1..980: note = engineered CasX variant
QEIKRINKIRRRLVKDSNTKKAGKTGPMKTLLVRVMTPDLRERLENLRKKPENIPQPISNTSRANLNKLLTDYTEMKKAILHVYWEEFQKDPVGLMSRVAQPASKKIDQNKLKPEMDEKGNLTTAGFACSQCGQPLFVYKLEQVSEKGKAYTNYFGRCNVAEHEKLILLAQLKPEKDSDEAVTYSLGKFGQRALDFYSIHVTKESTHPVKPLAQIAGNRYASGPVGKALRDACMGTIASFLSKYQDIIIEHQKVVKGNQKRLESLRELAGKENLEYPSVTLPPQPHTKEGVDAYNEVIARVRMWVNLNLWQKLKLSRDDAKPLLRLKGFPSFPLVERQANEVDWWDMVCNVKKLINEKKEDGKVFWQNLAGYKRQEALRPYLSSEEDRKKGKKFARYQLGDLLLHLEKKHGEYDWGKVYDEAWERIDKKVEGLSKHIKLEEERRSEDAQSKAALTDWLRAKASFVIEGLKEADKDEFCRCELKLQKWYGDLRGKPFAIEAENSILDISGFSKQYNCAFIWQKDGVKKLNLYLIINYFKGGKLRFKKIKPEAFEANRFYTVINKKSGEIVPMEVNFNFDDPNLIILPLAFGKRQGREFIWNDLLSLETGSLKLANGRVIEKTLYNRRTRQDEPALFVALTFERREVLDSSNIKPMNLIGVDRGENIPAVIALTDPEGCPLSRFKDSLGNPTHILRIGESYKEKQRTIQAKKEVEQRRAGGYSRKYASKAKNLADDMVRNTARDLLYYAVTQDAMLIFENLSRGFGRQGKRTFMAERQYTRMEDWLTAKLAYEGPLPSKTYLSKTLAQYTSKTCSNCGFTITSADYDRVLEKLKKTATGWMTTINGKELKVEGQITYYNRYKRQNVVKDLSVELDRLSEESVNNDISSWTKGRSGEALSLLKKRFSHRPVQEKFVCLNCGFETHADEQAALNIARSWLFLRSQEYKKYQTNKTTGNTDKRAFVETWQSFYRKKLKEVWKPAV

SEQ ID NO: 49427 - protein, 979 aa, synthetic construct
  REGION 1..979: note = engineered CasX variant
QEIKRINKIRRRLVKDSNTKKAGKTGPMKTLLVRVMTPDLRERLENLRKKPENIPQPISNTSRANLNKLLTDYTEMKKAILHVYWEEFQKDPVGLMSRVAQPASKKIDQNKLKPEMDEKGNLTTAGFACSQCGQPLFVYKLEQVSEKGKAYTNYFGRCNVAEHEKLILLAQLKPEKDSDEAVTYSLGKFGQRALDFYSIHVTKESTHPVKPLAQIAGNRYASGPVGKALRDACMGTIASFLSKYQDIIIEHQKVVKGNQKRLESLRELAGKENLEYPSVTLPPQPHTKEGVDAYNEVIARVRMWVNLNLWQKLKLSRDDAKPLLRLKGFPSFPLVERQANEVDWWDMVCNVKKLINEKKEDGKVFWQNLAGYKRQEALRPYLSSEEDRKKGKKFARYQLGDLLLHLEKKHGEDWGDVYDEAWERIDKKVEGLSKHIKLEEERRSEDAQSKAALTDWLRAKASFVIEGLKEADKDEFCRCELKLQKWYGDLRGKPFAIEAENSILDISGFSKQYNCAFIWQKDGVKKLNLYLIINYFKGGKLRFKKIKPEAFEANRFYTVINKKSGEIVPMEVNFNFDDPNLIILPLAFGKRQGREFIWNDLLSLETGSLKLANGRVIEKTLYNRRTRQDEPALFVALTFERREVLDSSNIKPMNLIGVDRGENIPAVIALTDPEGCPLSRFKDSLGNPTHILRIGESYKEKQRTIQAKKEVEQRRAGGYSRKYASKAKNLADDMVRNTARDLLYYAVTQDAMLIFENLSRGFGRQGKRTFMAERQYTRMEDWLTAKLAYEGPLPSKTYLSKTLAQYTSKTCSNCGFTITSADYDRVLEKLKKTATGWMTTINGKELKVEGQITYYNRYKRQNVVKDLSVELDRLSEESVNNDISSWTKGRSGEALSLLKKRFSHRPVQEKFVCLNCGFETHADEQAALNIARSWLFLRSQEYKKYQTNKTTGNTDKRAFVETWQSFYRKKLKEVWKPAV

SEQ ID NO: 49428 - protein, 979 aa, synthetic construct
  REGION 1..979: note = engineered CasX variant
QEIKRINKIRRRLVKDSNTKKAGKTGPMKTLLVRVMTPDLRERLENLRKKPENIPQPISNTSRANLNKLLTDYTEMKKAILHVYWEEFQKDPVGLMSRVAQPASKKIDQNKLKPEMDEKGNLTTAGFACSQCGQPLFVYKLEQVSEKGKAYTNYFGRCNVAEHEKLILLAQLKPEKDSDEAVTYSLGKFGQRALDFYSIHVTKESTHPVKPLAQIAGNRYASGPVGKALRDACMGTIASFLSKYQDIIIEHQKVVKGNQKRLESLRELAGKENLEYPSVTLPPQPHTKEGVDAYNEVIARVRMWVNLNLWQKLKLSRDDAKPLLRLKGFPSFPLVERQANEVDWWDMVCNVKKLINEKKEDGKVFWQNLAGYKRQEALRPYLSSEEDRKKGKKFARYQLGDLLLHLEKKHGEDWGKVYGEAWERIDKKVEGLSKHIKLEEERRSEDAQSKAALTDWLRAKASFVIEGLKEADKDEFCRCELKLQKWYGDLRGKPFAIEAENSILDISGFSKQYNCAFIWQKDGVKKLNLYLIINYFKGGKLRFKKIKPEAFEANRFYTVINKKSGEIVPMEVNFNFDDPNLIILPLAFGKRQGREFIWNDLLSLETGSLKLANGRVIEKTLYNRRTRQDEPALFVALTFERREVLDSSNIKPMNLIGVDRGENIPAVIALTDPEGCPLSRFKDSLGNPTHILRIGESYKEKQRTIQAKKEVEQRRAGGYSRKYASKAKNLADDMVRNTARDLLYYAVTQDAMLIFENLSRGFGRQGKRTFMAERQYTRMEDWLTAKLAYEGPLPSKTYLSKTLAQYTSKTCSNCGFTITSADYDRVLEKLKKTATGWMTTINGKELKVEGQITYYNRYKRQNVVKDLSVELDRLSEESVNNDISSWTKGRSGEALSLLKKRFSHRPVQEKFVCLNCGFETHADEQAALNIARSWLFLRSQEYKKYQTNKTTGNTDKRAFVETWQSFYRKKLKEVWKPAV

SEQ ID NO: 49429 - protein, 979 aa, synthetic construct
  REGION 1..979: note = engineered CasX variant
QEIKRINKIRRRLVKDSNTKKAGKTGPMKTLLVRVMTPDLRERLENLRKKPENIPQPISNTSRANLNKLLTDYTEMKKAILHVYWEEFQKDPVGLMSRVAQPASKKIDQNKLKPEMDEKGNLTTAGFACSQCGQPLFVYKLEQVSEKGKAYTNYFGRCNVAEHEKLILLAQLKPEKDSDEAVTYSLGKFGQRALDFYSIHVTKESTHPVKPLAQIAGNRYASGPVGKALRDACMGTIASFLSKYQDIIIEHQKVVKGNQKRLESLRELAGKENLEYPSVTLPPQPHTKEGVDAYNEVIARVRMWVNLNLWQKLKLSRDDAKPLLRLKGFPSFPLVERQANEVDWWDMVCNVKKLINEKKEDGKVFWQNLAGYKRQEALRPYLSSEEDRKKGKKFARYQLGDLLLHLEKKHGEDWGKVYDEAWERIDKKVEGLSKHIKLEEERRSEDAQSKAALTDWLRAKASFVIEGKKEADKDEFCRCELKLQKWYGDLRGKPFAIEAENSILDISGFSKQYNCAFIWQKDGVKKLNLYLIINYFKGGKLRFKKIKPEAFEANRFYTVINKKSGEIVPMEVNFNFDDPNLIILPLAFGKRQGREFIWNDLLSLETGSLKLANGRVIEKTLYNRRTRQDEPALFVALTFERREVLDSSNIKPMNLIGVDRGENIPAVIALTDPEGCPLSRFKDSLGNPTHILRIGESYKEKQRTIQAKKEVEQRRAGGYSRKYASKAKNLADDMVRNTARDLLYYAVTQDAMLIFENLSRGFGRQGKRTFMAERQYTRMEDWLTAKLAYEGPLPSKTYLSKTLAQYTSKTCSNCGFTITSADYDRVLEKLKKTATGWMTTINGKELKVEGQITYYNRYKRQNVVKDLSVELDRLSEESVNNDISSWTKGRSGEALSLLKKRFSHRPVQEKFVCLNCGFETHADEQAALNIARSWLFLRSQEYKKYQTNKTTGNTDKRAFVETWQSFYRKKLKEVWKPAV

SEQ ID NO: 49430 - protein, 979 aa, synthetic construct
  REGION 1..979: note = engineered CasX variant
QEIKRINKIRRRLVKDSNTKKAGKTGPMKTLLVRVMTPDLRERLENLRKKPENIPQPISNTSRANLNKLLTDYTEMKKAILHVYWEEFQKDPVGLMSRVAQPASKKIDQNKLKPEMDEKGNLTTAGFACSQCGQPLFVYKLEQVSEKGKAYTNYFGRCNVAEHEKLILLAQLKPEKDSDEAVTYSLGKFGQRALDFYSIHVTKESTHPVKPLAQIAGNRYASGPVGKALRDACMGTIASFLSKYQDIIIEHQKVVKGNQKRLESLRELAGKENLEYPSVTLPPQPHTKEGVDAYNEVIARVRMWVNLNLWQKLKLSRDDAKPLLRLKGFPSFPLVERQANEVDWWDMVCNVKKLINEKKEDGKVFWQNLAGYKRQEALRPYLSSEEDRKKGKKFARYQLGDLLLHLEKKHGEDWGKVYDEAWERIDKKVEGLSKHIKLEEERRSEDAQSKAALTDWLRAKASFVIEGSKEADKDEFCRCELKLQKWYGDLRGKPFAIEAENSILDISGFSKQYNCAFIWQKDGVKKLNLYLIINYFKGGKLRFKKIKPEAFEANRFYTVINKKSGEIVPMEVNFNFDDPNLIILPLAFGKRQGREFIWNDLLSLETGSLKLANGRVIEKTLYNRRTRQDEPALFVALTFERREVLDSSNIKPMNLIGVDRGENIPAVIALTDPEGCPLSRFKDSLGNPTHILRIGESYKEKQRTIQAKKEVEQRRAGGYSRKYASKAKNLADDMVRNTARDLLYYAVTQDAMLIFENLSRGFGRQGKRTFMAERQYTRMEDWLTAKLAYEGPLPSKTYLSKTLAQYTSKTCSNCGFTITSADYDRVLEKLKKTATGWMTTINGKELKVEGQITYYNRYKRQNVVKDLSVELDRLSEESVNNDISSWTKGRSGEALSLLKKRFSHRPVQEKFVCLNCGFETHADEQAALNIARSWLFLRSQEYKKYQTNKTTGNTDKRAFVETWQSFYRKKLKEVWKPAV

SEQ ID NO: 49431 - protein, 980 aa, synthetic construct
  REGION 1..980: note = engineered CasX variant
QEIKRINKIRRRLVKDSNTKKAGKTGPMKTLLVRVMTPDLRERLENLRKKPENIPQPISNTSRANLNKLLTDYTEMKKAILHVYWEEFQKDPVGLMSRVAQPASKKIDQNKLKPEMDEKGNLTTAGFACSQCGQPLFVYKLEQVSEKGKAYTNYFGRCNVAEHEKLILLAQLKPEKDSDEAVTYSLGKFGQRALDFYSIHVTKESTHPVKPLAQIAGNRYASGPVGKALRDACMGTIASFLSKYQDIIIEHQKVVKGNQKRLESLRELAGKENLEYPSVTLPPQPHTKEGVDAYNEVIARVRMWVNLNLWQKLKLSRDDAKPLLRLKGFPSFPLVERQANEVDWWDMVCNVKKLINEKKEDGKVFWQNLAGYKRQEALRPYLSSEEDRKKGKKFARYQLGDLLLHLEKKHGEDWGKVYDEAWERIDKKVEGLSKHIKLEEERRSEDAQSKAALTDWLRAKASFVIEGLKEADDKDEFCRCELKLQKWYGDLRGKPFAIEAENSILDISGFSKQYNCAFIWQKDGVKKLNLYLIINYFKGGKLRFKKIKPEAFEANRFYTVINKKSGEIVPMEVNFNFDDPNLIILPLAFGKRQGREFIWNDLLSLETGSLKLANGRVIEKTLYNRRTRQDEPALFVALTFERREVLDSSNIKPMNLIGVDRGENIPAVIALTDPEGCPLSRFKDSLGNPTHILRIGESYKEKQRTIQAKKEVEQRRAGGYSRKYASKAKNLADDMVRNTARDLLYYAVTQDAMLIFENLSRGFGRQGKRTFMAERQYTRMEDWLTAKLAYEGPLPSKTYLSKTLAQYTSKTCSNCGFTITSADYDRVLEKLKKTATGWMTTINGKELKVEGQITYYNRYKRQNVVKDLSVELDRLSEESVNNDISSWTKGRSGEALSLLKKRFSHRPVQEKFVCLNCGFETHADEQAALNIARSWLFLRSQEYKKYQTNKTTGNTDKRAFVETWQSFYRKKLKEVWKPAV

SEQ ID NO: 49432 - protein, 980 aa, synthetic construct
  REGION 1..980: note = engineered CasX variant
QEIKRINKIRRRLVKDSNTKKAGKTGPMKTLLVRVMTPDLRERLENLRKKPENIPQPISNTSRANLNKLLTDYTEMKKAILHVYWEEFQKDPVGLMSRVAQPASKKIDQNKLKPEMDEKGNLTTAGFACSQCGQPLFVYKLEQVSEKGKAYTNYFGRCNVAEHEKLILLAQLKPEKDSDEAVTYSLGKFGQRALDFYSIHVTKESTHPVKPLAQIAGNRYASGPVGKALRDACMGTIASFLSKYQDIIIEHQKVVKGNQKRLESLRELAGKENLEYPSVTLPPQPHTKEGVDAYNEVIARVRMWVNLNLWQKLKLSRDDAKPLLRLKGFPSFPLVERQANEVDWWDMVCNVKKLINEKKEDGKVFWQNLAGYKRQEALRPYLSSEEDRKKGKKFARYQLGDLLLHLEKKHGEDWGKVYDEAWERIDKKVEGLSKHIKLEEERRSEDAQSKAALTDWLRAKASFVIEGLKEADKDEFCRCELKLQKWYGDLRGKPFAIEAENSILDISGFSKQYNCAFIWQKDGVKKLNLYLIINYFKGGKLRFKKIKPEAFEANRFYTVINKKSGEIVPMEVNFNFDDPNLIILPLAFGKRQGREFIWNDLLSLETGSLKLANGRVIEKTLYNRRTRQDEPALFVALTFERREVLDSSNIKPMNLIGVDRGENIPAVIALTDPEGCPLSRFKDSLGNPTHILRIGESYKEKQRTIQAKKEVEQRRAGGYSRKYASKAKNLADDMVRNTARDLLYYAVTQDAMLIFENLSRGFGRQGKRTFMAERQYTRMEDWLTAKLAYEGPLPSKTYLSKTLAQYTSKTCSNCGFTITSADYDRVLEKLKKTATGWMTTINGKELKVEGQITYYNRYKRQNVVKDLSVELDRLSEESVNNDISSWTKGRSGNEALSLLKKRFSHRPVQEKFVCLNCGFETHADEQAALNIARSWLFLRSQEYKKYQTNKTTGNTDKRAFVETWQSFYRKKLKEVWKPAV

SEQ ID NO: 49433 - protein, 979 aa, synthetic construct
  REGION 1..979: note = engineered CasX variant
QEIKRINKIRRRLVKDSNTKKAGKTGPMKTLLVRVMTPDLRERLENLRKKPENIPQPISNTSRANLNKLLTDYTEMKKAILHVYWEEFQKDPVGLMSRVAQPASKKIDQNKLKPEMDEKGNLTTAGFACSQCGQPLFVYKLEQVSEKGKAYTNYFGRCNVAEHEKLILLAQLKPEKDSDEAVTYSLGKFGQRALDFYSIHVTKESTHPVKPLAQIAGNRYASGPVGKALRDACMGTIASFLSKYQDIIIEHQKVVKGNQKRLESLRELAGKENLEYPSVTLPPQPHTKEGVDAYNEVIARVRMWVNLNLWQKLKLSRDDAKPLLRLKGFPSFPLVERQANEVDWWDMVCNVKKLINEKKEDGKVFWQNLAGYKRQEALRPYLSSEEDRQKGKKFARYQLGDLLLHLEKKHGEDWGKVYDEAWERIDKKVEGLSKHIKLEEERRSEDAQSKAALTDWLRAKASFVIEGLKEADKDEFCRCELKLQKWYGDLRGKPFAIEAENSILDISGFSKQYNCAFIWQKDGVKKLNLYLIINYFKGGKLRFKKIKPEAFEANRFYTVINKKSGEIVPMEVNFNFDDPNLIILPLAFGKRQGREFIWNDLLSLETGSLKLANGRVIEKTLYNRRTRQDEPALFVALTFERREVLDSSNIKPMNLIGVDRGENIPAVIALTDPEGCPLSRFKDSLGNPTHILRIGESYKEKQRTIQAKKEVEQRRAGGYSRKYASKAKNLADDMVRNTARDLLYYAVTQDAMLIFENLSRGFGRQGKRTFMAERQYTRMEDWLTAKLAYEGPLPSKTYLSKTLAQYTSKTCSNCGFTITSADYDRVLEKLKKTATGWMTTINGKELKVEGQITYYNRYKRQNVVKDLSVELDRLSEESVNNDISSWTKGRSGEALSLLKKRFSHRPVQEKFVCLNCGFETHADEQAALNIARSWLFLRSQEYKKYQTNKTTGNTDKRAFVETWQSFYRKKLKEVWKPAV

SEQ ID NO: 49434 - protein, 979 aa, synthetic construct
  REGION 1..979: note = engineered CasX variant
QEIKRINKIRRRLVKDSNTKKAGKTGPMKTLLVRVMTPDLRERLENLRKKPENIPQPISNTSRANLNKLLTDYTEMKKAILHVYWEEFQKDPVGLMSRVAQPASKKIDQNKLKPEMDEKGNLTTAGFACSQCGQPLFVYKLEQVSEKGKAYTNYFGRCNVAEHEKLILLAQLKPEKDSDEAVTYSLGKFGQRALDFYSIHVTKESTHPVKPLAQIAGNRYASGPVGKALRDACMGTIASFLSKYQDIIIEHQKVVKGNQKRLESLRELAGKENLEYPSVTLPPQPHTKEGVDAYNEVIARVRMWVNLNLWQKLKLSRDDAKPLLRLKGFPSFPLVERQANEVDWWDMVCNVKKLINEKKEDGKVFWQNLAGYKRQEALRPYLSSEEDRKKGKKFARYQLGDLLLHLEKKHGEDWGKVYDEAWERIDKKVEGLSKHIKLEEERRSEDAQSKAALTDWLRAKASFVIEGLKEADKDEFCRCELKLQKWYGDLRGKPFAIEAENSILDISGFSKQYNCAFIWQKDGVKKLNLYLIINYFKGGKLRFKKIKPEAFEANRFYTVINKKSGEIVPMEVNFNFDDPNLIILPLAFGKRQGREFIWNDLLSLETGSLKLANGRVIEKTLYNRRTRQDEPALFVALTFERREVLDSSNIKPMNLIGVDRGENIPAVIALTDPEGCPLSRFKDSLGNPTHILRIGESYKEKQRTIQAKKEVEQRRAGGYSRKYASKAKNLADDMVRNTARDLLYYAVTQDAMLIFENLSRGFGRQGKRTFMAERQYTRMEDWLTAKLAYEGPLPSQTYLSKTLAQYTSKTCSNCGFTITSADYDRVLEKLKKTATGWMTTINGKELKVEGQITYYNRYKRQNVVKDLSVELDRLSEESVNNDISSWTKGRSGEALSLLKKRFSHRPVQEKFVCLNCGFETHADEQAALNIARSWLFLRSQEYKKYQTNKTTGNTDKRAFVETWQSFYRKKLKEVWKPAV

SEQ ID NO: 49435 - protein, 979 aa, synthetic construct
  REGION 1..979: note = engineered CasX variant
QEIKRINKIRRRLVKDSNTKKAGKTGPMKTLLVRVMTPDLRERLENLRKKPENIPQPISNTSRANLNKLLTDYTEMKKAILHVYWEEFQKDPVGLMSRVAQPASKKIDQNKLKPEMDEKGNLTTAGFACSQCGQPLFVYKLEQVSEKGKAYTNYFGRCNVAEHEKLILLAQLKPEKDSDEAVTYSLGKFGQRALDFYSIHVTKESTHPVKPLAQIAGNRYASGPVGKALRDACMGTIASFLSKYQDIIIEHQKVVKGNQKRLESLRELAGKENLEYPSVTLPPQPHTKEGVDAYNEVIARVRMWVNLNLWQKLKLSRDDAKPLLRLKGFPSFPLVERQANEVDWWDMVCNVKKLINEKKEDGKVFWQNLAGYKRQEALRPYLSSEEDRKKGKKFARYQLGDLLLHLEKKHGEDWGKVYDEAWERIDKKVEGLSKHIKLEEERRSEDAQSKAALTDWLRAKASFVIEGLKEADKDEFCRCELKLQKWYGDLRGKPFAIEAENSILDISGFSKQYNCAFIWQKDGVKKLNLYLIINYFKGGKLRFKKIKPEAFEANRFYTVINKKSGEIVPMEVNFNFDDPNLIILPLAFGKRQGREFIWNDLLSLETGSLKLANGRVIEKTLYNRRTRQDEPALFVALTFERREVLDSSNIKPMNLIGVDRGENIPAVIALTDPEGCPLSRFKDSLGNPTHILRIGESYKEKQRTIQAKKEVEQRRAGGYSRKYASKAKNLADDMVRNTARDLLYYAVTQDAMLIFENLSRGFGRQGKRTFMAERQYTRMEDWLTAKLAYNGPLPSKTYLSKTLAQYTSKTCSNCGFTITSADYDRVLEKLKKTATGWMTTINGKELKVEGQITYYNRYKRQNVVKDLSVELDRLSEESVNNDISSWTKGRSGEALSLLKKRFSHRPVQEKFVCLNCGFETHADEQAALNIARSWLFLRSQEYKKYQTNKTTGNTDKRAFVETWQSFYRKKLKEVWKPAV

SEQ ID NO: 49436 - protein, 979 aa, synthetic construct
  REGION 1..979: note = engineered CasX variant
QEIKRINKIRRRLVKDSNTKKAGKTGPMKTLLVRVMTPDLRERLENLRKKPENIPQPISNTSRANLNKLLTDYTEMKKAILHVYWEEFQKDPVGLMSRVAQPASKKIDQNKLKPEMDEKGNLTTAGFACSQCGQPLFVYKLEQVSEKGKAYTNYFGRCNVAEHEKLIQLAQLKPEKDSDEAVTYSLGKFGQRALDFYSIHVTKESTHPVKPLAQIAGNRYASGPVGKALRDACMGTIASFLSKYQDIIIEHQKVVKGNQKRLESLRELAGKENLEYPSVTLPPQPHTKEGVDAYNEVIARVRMWVNLNLWQKLKLSRDDAKPLLRLKGFPSFPLVERQANEVDWWDMVCNVKKLINEKKEDGKVFWQNLAGYKRQEALRPYLSSEEDRKKGKKFARYQLGDLLLHLEKKHGEDWGKVYDEAWERIDKKVEGLSKHIKLEEERRSEDAQSKAALTDWLRAKASFVIEGLKEADKDEFCRCELKLQKWYGDLRGKPFAIEAENSILDISGFSKQYNCAFIWQKDGVKKLNLYLIINYFKGGKLRFKKIKPEAFEANRFYTVINKKSGEIVPMEVNFNFDDPNLIILPLAFGKRQGREFIWNDLLSLETGSLKLANGRVIEKTLYNRRTRQDEPALFVALTFERREVLDSSNIKPMNLIGVDRGENIPAVIALTDPEGCPLSRFKDSLGNPTHILRIGESYKEKQRTIQAKKEVEQRRAGGYSRKYASKAKNLADDMVRNTARDLLYYAVTQDAMLIFENLSRGFGRQGKRTFMAERQYTRMEDWLTAKLAYEGPLPSKTYLSKTLAQYTSKTCSNCGFTITSADYDRVLEKLKKTATGWMTTINGKELKVEGQITYYNRYKRQNVVKDLSVELDRLSEESVNNDISSWTKGRSGEALSLLKKRFSHRPVQEKFVCLNCGFETHADEQAALNIARSWLFLRSQEYKKYQTNKTTGNTDKRAFVETWQSFYRKKLKEVWKPAV

SEQ ID NO: 49437 - protein, 979 aa, synthetic construct
  REGION 1..979: note = engineered CasX variant
QEIKRINKIRRRLVKDSNTKKAGKTGPMKTLLVRVMTPDLRERLENLRKKPENIPQPISNTSRANLNKLLTDYTEMKKAILHVYWEEFQKDPVGLMSRVAQPASKKIDQNKLKPEMDEKGNLTTAGFACSQCGQPLFVYKLEQVSEKGKAYTNYFGRCNVAEHEKLILLAQLKPEKDSDEAVTYSLGKFGQRALDFYSIHVTKESTHPVKPLAQIAGNRYASGPVGKALRDACMGTIASFLSKYQDIIIEHQKVVKGNQKRLESLRELAGKENLEYPSVTLPPQPHTKEGVDAYNEVIARVRMWVNLNLWQKLKLSRDDAKPLLRLKGFPSFPLVERQANEVDWWDMVCNVKKLINEKKEDGKVFWQNLAIYKRQEALRPYLSSEEDRKKGKKFARYQLGDLLLHLEKKHGEDWGKVYDEAWERIDKKVEGLSKHIKLEEERRSEDAQSKAALTDWLRAKASFVIEGLKEADKDEFCRCELKLQKWYGDLRGKPFAIEAENSILDISGFSKQYNCAFIWQKDGVKKLNLYLIINYFKGGKLRFKKIKPEAFEANRFYTVINKKSGEIVPMEVNFNFDDPNLIILPLAFGKRQGREFIWNDLLSLETGSLKLANGRVIEKTLYNRRTRQDEPALFVALTFERREVLDSSNIKPMNLIGVDRGENIPAVIALTDPEGCPLSRFKDSLGNPTHILRIGESYKEKQRTIQAKKEVEQRRAGGYSRKYASKAKNLADDMVRNTARDLLYYAVTQDAMLIFENLSRGFGRQGKRTFMAERQYTRMEDWLTAKLAYEGPLPSKTYLSKTLAQYTSKTCSNCGFTITSADYDRVLEKLKKTATGWMTTINGKELKVEGQITYYNRYKRQNVVKDLSVELDRLSEESVNNDISSWTKGRSGEALSLLKKRFSHRPVQEKFVCLNCGFETHADEQAALNIARSWLFLRSQEYKKYQTNKTTGNTDKRAFVETWQSFYRKKLKEVWKPAV

SEQ ID NO: 49438 - protein, 979 aa, synthetic construct
  REGION 1..979: note = engineered CasX variant
QEIKRINKIRRRLVKDSNTKKAGKTGPMKTLLVRVMTPDLRERLENLRKKPENIPQPISNTSRANLNKLLTDYTEMKKAILHVYWEEFQKDPVGLMSRVAQPASKKIDQNKLKPEMDEKGNLTTAGFACSQCGQPLFVYKLEQVSEKGKAYTNYFGRCNVAEHEKLILLAQLKPEKDSDEAVTYSLGKFGQRALDFYSIHVTKESTHPVKPLAQIAGNRYASGPVGKALRDACMGTIASFLSKYQDIIIEHQKVVKGNQKRLESLRELAGKENLEYPSVTLPPQPHTKEGVDAYNEVIARVRMWVNLNLWQKLKLSRDDAKPLLRLKGFPSFPLVERQANEVDWWDMVCNVKKLINEKKEDGKVFWQNLAGYKRQEALRPYLSSEEDREKGKKFARYQLGDLLLHLEKKHGEDWGKVYDEAWERIDKKVEGLSKHIKLEEERRSEDAQSKAALTDWLRAKASFVIEGLKEADKDEFCRCELKLQKWYGDLRGKPFAIEAENSILDISGFSKQYNCAFIWQKDGVKKLNLYLIINYFKGGKLRFKKIKPEAFEANRFYTVINKKSGEIVPMEVNFNFDDPNLIILPLAFGKRQGREFIWNDLLSLETGSLKLANGRVIEKTLYNRRTRQDEPALFVALTFERREVLDSSNIKPMNLIGVDRGENIPAVIALTDPEGCPLSRFKDSLGNPTHILRIGESYKEKQRTIQAKKEVEQRRAGGYSRKYASKAKNLADDMVRNTARDLLYYAVTQDAMLIFENLSRGFGRQGKRTFMAERQYTRMEDWLTAKLAYEGPLPSKTYLSKTLAQYTSKTCSNCGFTITSADYDRVLEKLKKTATGWMTTINGKELKVEGQITYYNRYKRQNVVKDLSVELDRLSEESVNNDISSWTKGRSGEALSLLKKRFSHRPVQEKFVCLNCGFETHADEQAALNIARSWLFLRSQEYKKYQTNKTTGNTDKRAFVETWQSFYRKKLKEVWKPAV

SEQ ID NO: 49439 - protein, 979 aa, synthetic construct
  REGION 1..979: note = engineered CasX variant
QEIKRINKIRRRLVKDSNTKKAGKTGPMKTLLVRVMTPDLRERLENLRKKPENIPQPISNTSRANLNKLLTDYTEMKKAILHVYWEEFQKDPVGLMSRVAQPASKKIDQNKLKPEMDEKGNLTTAGFACSQCGQPLFVYKLEQVSEKGKAYTNYFGRCNVAEHEKLILLAQLKPEKDSDEAVTYSLGKFGQRALDFYSIHVTKESTHPVKPLAQIAGNRYASGPVGKALRDACMGTIASFLSKYQDIIIEHQKVVKGNQKRLESLRELAGKENLEYPSVTLPPQPHTKEGVDAYNEVIARVRMWVNLNLWQKLKLSRDDAKPLLRLKGFPSFPLVERQANEVDWWDMVCNVKKLINEKKEDGKVFWQNLAGYKRQEALRPYLSSEEDRKKGKKFARYQLGDLLLHLEKKHGEDWGKVYDEAWERIDKKVEGLSKHIKLEEERRSEDAQSKAALTDWLRAKASFVIEGLKEADKDEFCRCELKLQKWYGDLRGKPFAIEAENSILDISGFSKQYNCAFIWQKDGVKKLNLYLIINYFKGGKLRFKKIKPEAFEANRFYTVINKKSGEIVIMEVNFNFDDPNLIILPLAFGKRQGREFIWNDLLSLETGSLKLANGRVIEKTLYNRRTRQDEPALFVALTFERREVLDSSNIKPMNLIGVDRGENIPAVIALTDPEGCPLSRFKDSLGNPTHILRIGESYKEKQRTIQAKKEVEQRRAGGYSRKYASKAKNLADDMVRNTARDLLYYAVTQDAMLIFENLSRGFGRQGKRTFMAERQYTRMEDWLTAKLAYEGPLPSKTYLSKTLAQYTSKTCSNCGFTITSADYDRVLEKLKKTATGWMTTINGKELKVEGQITYYNRYKRQNVVKDLSVELDRLSEESVNNDISSWTKGRSGEALSLLKKRFSHRPVQEKFVCLNCGFETHADEQAALNIARSWLFLRSQEYKKYQTNKTTGNTDKRAFVETWQSFYRKKLKEVWKPAV

SEQ ID NO: 49440 - protein, 979 aa, synthetic construct
  REGION 1..979: note = engineered CasX variant
QEIKRINKIRRRLVKDSNTKKAGKTGPMKTLLVRVMTPDLRERLENLRKKPENIPQPISNTSRANLNKLLTDYTEMKKAILHVYWEEFQKDPVGLMSRVAQPASKKIDQNKLKPEMDEKGNLTTAGFACSQCGQPLFVYKLEQVSEKGKAYTNYFGRCNVAEHEKLILLAQLKPEKDSDEAVTYSLGKFGQRALDFYSIHVTKESTHPVKPLAQIAGNRYASGPVGKALRGACMGTIASFLSKYQDIIIEHQKVVKGNQKRLESLRELAGKENLEYPSVTLPPQPHTKEGVDAYNEVIARVRMWVNLNLWQKLKLSRDDAKPLLRLKGFPSFPLVERQANEVDWWDMVCNVKKLINEKKEDGKVFWQNLAGYKRQEALRPYLSSEEDVRKKGKKFARYQLGDLLLHLEKKHGEDWGKVYDEAWERIDKKVEGLSKHIKLEEERRSEDAQSKAALTDWLRAKASFVIEGLKEADKDEFCRCELKLQKWYGDLRGKPFAIEAENSILDISGFSKQYNCAFIWQKDGVKKLNLYLIINYFKGGKLRFKKIKPEAFEANRFYTVINKKSGEIVPMEVNFNFDDPNLIILPLAFGKRQGREFIWNDLLSLETGSLKLANGRVIEKTLYNRRTRQDEPALFVALTFERREVLDSSNIKPMNLIGVDRGENIPAVIALTDPEGCPLSRFKDSLGNPTHILRIGESYKEKQRTIQAKKEVEQRRAGGYSRKYASKAKNLADDMVRNTARDLLYYAVTQDAMLIFENLSRGFGRQGKRTFMAERQYTRMEDWLTAKLAYEGLPSKTYLSKTLAQYTSKTCSNCGFTITSADYDRVLEKLKKTATGWMTTINGKELKVEGQITYYNRYKRQNVVKDLSVELDRLSEESVNNDISSWTKGRSGEALSLLKKRFSHRPVQEKFVCLNCGFETHADEQAALNIARSWLFLRSQEYKKYQTNKTTGNTDKRAFVETWQSFYRKKLKEVWKPAV

SEQ ID NO: 49441 - protein, 979 aa, synthetic construct
  REGION 1..979: note = engineered CasX variant
QEIKRINKIRRRLVKDSNTKKAGKTGPMKTLLVRVMTPDLRERLENLRKKPENIPQPISNTSRANLNKLLTDYTEMKKAILHVYWEEFQKDPVGLMSRVAQPASKKIDQNKLKPEMDEKGNLTTAGFACSQCGQPLFVYKLEQVSEKGKAYTNYFGRCNVAEHEKLILLAQLKPEKDSDEAVTYSLGKFGQRALDFYSIHVTKESTHPVKPLAQIAGNRYASGPVGKALRDACMGTIASFLSKYQDIIIEHQKVVKGNQKRLESLRELAGKENLEYPSVTLPPQPHTKEGVDAYNEVIARVRMWVNLNLWQKLKLSRDDAKPLLRLKNFPSFPLVERQANEVDWWDMVCNVKKLINEKKEDGKVFWQNLAGYKRQEALRPYLSSEEDVRKKGKKFARYQLGDLLLHLEKKHGEDWGKVYDEAWERIDKKVEGLSKHIKLEEERRSEDAQSKAALTDWLRAKASFVIEGLKEADKDEFCRCELKLQKWYGDLRGKPFAIEAENSILDISGFSKQYNCAFIWQKDGVKKLNLYLIINYFKGGKLRFKKIKPEAFEANRFYTVINKKSGEIVPMEVNFNFDDPNLIILPLAFGKRQGREFIWNDLLSLETGSLKLANGRVIEKTLYNRRTRQDEPALFVALTFERREVLDSSNIKPMNLIGVDRGENIPAVIALTDPEGCPLSRFKDSLGNPTHILRIGESYKEKQRTIQAKKEVEQRRAGGYSRKYASKAKNLADDMVRNTARDLLYYAVTQDAMLIFENLSRGFGRQGKRTFMAERQYTRMEDWLTAKLAYEGLPSKTYLSKTLAQYTSKTCSNCGFTITSADYDRVLEKLKKTATGWMTTINGKELKVEGQITYYNRYKRQNVVKDLSVELDRLSEESVNNDISSWTKGRSGEALSLLKKRFSHRPVQEKFVCLNCGFETHADEQAALNIARSWLFLRSQEYKKYQTNKTTGNTDKRAFVETWQSFYRKKLKEVWKPAV

SEQ ID NO: 49442 - protein, 979 aa, synthetic construct
  REGION 1..979: note = engineered CasX variant
QEIKRINKIRRRLVKDSNTKKAGKTGPMKTLLVRVMTPDLRERLENLRKKPENIPQPISNTSRANLNKLLTDYTEMKKAILHVYWEEFQKDPVGLMSRVAQPASKKIDQNKLKPEMDEKGNLTTAGFACSQCGQPLFVYKLEQVSEKGKAYTNYFGRCNVAEHEKLILLAQLKPEKDSDEAVTYSLGKFGQRALDFYSIHVTKESTHPVKPLAQIAGNRYASGPVGKALRDACMGTIASFLSKYQDIIIEHQKVVKGNQKRLESLRELAGKENLEYPSVTLPPQPHTKEGVDAYNEVIARVRMWVNLNLWQKLKLSRDDAKPLLRLKGFPSFPLVERQANEVDWWDMVCNVKKLINEKKEDGKVFWQNLAGYKRQEALRPYLSSEEDVRKKGKKFARYQLGDLLNHLEKKHGEDWGKVYDEAWERIDKKVEGLSKHIKLEEERRSEDAQSKAALTDWLRAKASFVIEGLKEADKDEFCRCELKLQKWYGDLRGKPFAIEAENSILDISGFSKQYNCAFIWQKDGVKKLNLYLIINYFKGGKLRFKKIKPEAFEANRFYTVINKKSGEIVPMEVNFNFDDPNLIILPLAFGKRQGREFIWNDLLSLETGSLKLANGRVIEKTLYNRRTRQDEPALFVALTFERREVLDSSNIKPMNLIGVDRGENIPAVIALTDPEGCPLSRFKDSLGNPTHILRIGESYKEKQRTIQAKKEVEQRRAGGYSRKYASKAKNLADDMVRNTARDLLYYAVTQDAMLIFENLSRGFGRQGKRTFMAERQYTRMEDWLTAKLAYEGLPSKTYLSKTLAQYTSKTCSNCGFTITSADYDRVLEKLKKTATGWMTTINGKELKVEGQITYYNRYKRQNVVKDLSVELDRLSEESVNNDISSWTKGRSGEALSLLKKRFSHRPVQEKFVCLNCGFETHADEQAALNIARSWLFLRSQEYKKYQTNKTTGNTDKRAFVETWQSFYRKKLKEVWKPAV

SEQ ID NO: 49443 - protein, 979 aa, synthetic construct
  REGION 1..979: note = engineered CasX variant
QEIKRINKIRRRLVKDSNTKKAGKTGPMKTLLVRVMTPDLRERLENLRKKPENIPQPISNTSRANLNKLLTDYTEMKKAILHVYWEEFQKDPVGLMSRVAQPASKKIDQNKLKPEMDEKGNLTTAGFACSQCGQPLFVYKLEQVSEKGKAYTNYFGRCNVAEHEKLILLAQLKPEKDSDEAVTYSLGKFGQRALDFYSIHVTKESTHPVKPLAQIAGNRYASGPVGKALRDACMGTIASFLSKYQDIIIEHQKVVKGNQKRLESLRELAGKENLEYPSVTLPPQPHTKEGVDAYNEVIARVRMWVNLNLWQKLKLSRDDAKPLLRLKGFPSFPLVERQANEVDWWDMVCNVKKLINEKKEDGKVFWQNLAGYKRQEALRPYLSSEEDVRKKGKKFARYQLGDLLWHLEKKHGEDWGKVYDEAWERIDKKVEGLSKHIKLEEERRSEDAQSKAALTDWLRAKASFVIEGLKEADKDEFCRCELKLQKWYGDLRGKPFAIEAENSILDISGFSKQYNCAFIWQKDGVKKLNLYLIINYFKGGKLRFKKIKPEAFEANRFYTVINKKSGEIVPMEVNFNFDDPNLIILPLAFGKRQGREFIWNDLLSLETGSLKLANGRVIEKTLYNRRTRQDEPALFVALTFERREVLDSSNIKPMNLIGVDRGENIPAVIALTDPEGCPLSRFKDSLGNPTHILRIGESYKEKQRTIQAKKEVEQRRAGGYSRKYASKAKNLADDMVRNTARDLLYYAVTQDAMLIFENLSRGFGRQGKRTFMAERQYTRMEDWLTAKLAYEGLPSKTYLSKTLAQYTSKTCSNCGFTITSADYDRVLEKLKKTATGWMTTINGKELKVEGQITYYNRYKRQNVVKDLSVELDRLSEESVNNDISSWTKGRSGEALSLLKKRFSHRPVQEKFVCLNCGFETHADEQAALNIARSWLFLRSQEYKKYQTNKTTGNTDKRAFVETWQSFYRKKLKEVWKPAV

SEQ ID NO: 49444 - protein, 979 aa, synthetic construct
  REGION 1..979: note = engineered CasX variant
QEIKRINKIRRRLVKDSNTKKAGKTGPMKTLLVRVMTPDLRERLENLRKKPENIPQPISNTSRANLNKLLTDYTEMKKAILHVYWEEFQKDPVGLMSRVAQPASKKIDQNKLKPEMDEKGNLTTAGFACSQCGQPLFVYKLEQVSEKGKAYTNYFGRCNVAEHEKLILLAQLKPEKDSDEAVTYSLGKFGQRALDFYSIHVTKESTHPVKPLAQIAGNRYASGPVGKALRDACMGTIASFLSKYQDIIIEHQKVVKGNQKRLESLRELAGKENLEYPSVTLPPQPHTKEGVDAYNEVIARVRMWVNLNLWQKLKLSRDDAKPLLRLKGFPSFPLVERQANEVDWWDMVCNVKKLINEKKEDGKVFWQNLAGYKRQEALRPYLSSEEDVRKKGKKFARYQLGDLLLHLYKKHGEDWGKVYDEAWERIDKKVEGLSKHIKLEEERRSEDAQSKAALTDWLRAKASFVIEGLKEADKDEFCRCELKLQKWYGDLRGKPFAIEAENSILDISGFSKQYNCAFIWQKDGVKKLNLYLIINYFKGGKLRFKKIKPEAFEANRFYTVINKKSGEIVPMEVNFNFDDPNLIILPLAFGKRQGREFIWNDLLSLETGSLKLANGRVIEKTLYNRRTRQDEPALFVALTFERREVLDSSNIKPMNLIGVDRGENIPAVIALTDPEGCPLSRFKDSLGNPTHILRIGESYKEKQRTIQAKKEVEQRRAGGYSRKYASKAKNLADDMVRNTARDLLYYAVTQDAMLIFENLSRGFGRQGKRTFMAERQYTRMEDWLTAKLAYEGLPSKTYLSKTLAQYTSKTCSNCGFTITSADYDRVLEKLKKTATGWMTTINGKELKVEGQITYYNRYKRQNVVKDLSVELDRLSEESVNNDISSWTKGRSGEALSLLKKRFSHRPVQEKFVCLNCGFETHADEQAALNIARSWLFLRSQEYKKYQTNKTTGNTDKRAFVETWQSFYRKKLKEVWKPAV

SEQ ID NO: 49445 - protein, 979 aa, synthetic construct
  REGION 1..979: note = engineered CasX variant
QEIKRINKIRRRLVKDSNTKKAGKTGPMKTLLVRVMTPDLRERLENLRKKPENIPQPISNTSRANLNKLLTDYTEMKKAILHVYWEEFQKDPVGLMSRVAQPASKKIDQNKLKPEMDEKGNLTTAGFACSQCGQPLFVYKLEQVSEKGKAYTNYFGRCNVAEHEKLILLAQLKPEKDSDEAVTYSLGKFGQRALDFYSIHVTKESTHPVKPLAQIAGNRYASGPVGKALRDACMGTIASFLSKYQDIIIEHQKVVKGNQKRLESLRELAGKENLEYPSVTLPPQPHTKEGVDAYNEVIARVRMWVNLNLWQKLKLSRDDAKPLLRLKGFPSFPLVERQANEVDWWDMVCNVKKLINEKKEDGKVFWQNLAGYKRQEALRPYLSSEEDVRKKGKKFARYQLGDLLLHLEKKHPEDWGKVYDEAWERIDKKVEGLSKHIKLEEERRSEDAQSKAALTDWLRAKASFVIEGLKEADKDEFCRCELKLQKWYGDLRGKPFAIEAENSILDISGFSKQYNCAFIWQKDGVKKLNLYLIINYFKGGKLRFKKIKPEAFEANRFYTVINKKSGEIVPMEVNFNFDDPNLIILPLAFGKRQGREFIWNDLLSLETGSLKLANGRVIEKTLYNRRTRQDEPALFVALTFERREVLDSSNIKPMNLIGVDRGENIPAVIALTDPEGCPLSRFKDSLGNPTHILRIGESYKEKQRTIQAKKEVEQRRAGGYSRKYASKAKNLADDMVRNTARDLLYYAVTQDAMLIFENLSRGFGRQGKRTFMAERQYTRMEDWLTAKLAYEGLPSKTYLSKTLAQYTSKTCSNCGFTITSADYDRVLEKLKKTATGWMTTINGKELKVEGQITYYNRYKRQNVVKDLSVELDRLSEESVNNDISSWTKGRSGEALSLLKKRFSHRPVQEKFVCLNCGFETHADEQAALNIARSWLFLRSQEYKKYQTNKTTGNTDKRAFVETWQSFYRKKLKEVWKPAV

SEQ ID NO: 49446 - protein, 980 aa, synthetic construct
  REGION 1..980: note = engineered CasX variant
QEIKRINKIRRRLVKDSNTKKAGKTGPMKTLLVRVMTPDLRERLENLRKKPENIPQPISNTSRANLNKLLTDYTEMKKAILHVYWEEFQKDPVGLMSRVAQPASKKIDQNKLKPEMDEKGNLTTAGFACSQCGQPLFVYKLEQVSEKGKAYTNYFGRCNVAEHEKLILLAQLKPEKDSDEAVTYSLGKFGQRALDFYSIHVTKESTHPVKPLAQIAGNRYASGPVGKALRDACMGTIASFLSKYQDIIIEHQKVVKGNQKRLESLRELAGKENLEYPSVTLPPQPHTKEGVDAYNEVIARVRMWVNLNLWQKLKLSRDDAKPLLRLKGFPSFPLVERQANEVDWWDMVCNVKKLINEKKEDGKVFWQNLAGYKRQEALRPYLSSEEDVRKKGKKFARYQLGDLLLHLEKKHGERDWGKVYDEAWERIDKKVEGLSKHIKLEEERRSEDAQSKAALTDWLRAKASFVIEGLKEADKDEFCRCELKLQKWYGDLRGKPFAIEAENSILDISGFSKQYNCAFIWQKDGVKKLNLYLIINYFKGGKLRFKKIKPEAFEANRFYTVINKKSGEIVPMEVNFNFDDPNLIILPLAFGKRQGREFIWNDLLSLETGSLKLANGRVIEKTLYNRRTRQDEPALFVALTFERREVLDSSNIKPMNLIGVDRGENIPAVIALTDPEGCPLSRFKDSLGNPTHILRIGESYKEKQRTIQAKKEVEQRRAGGYSRKYASKAKNLADDMVRNTARDLLYYAVTQDAMLIFENLSRGFGRQGKRTFMAERQYTRMEDWLTAKLAYEGLPSKTYLSKTLAQYTSKTCSNCGFTITSADYDRVLEKLKKTATGWMTTINGKELKVEGQITYYNRYKRQNVVKDLSVELDRLSEESVNNDISSWTKGRSGEALSLLKKRFSHRPVQEKFVCLNCGFETHADEQAALNIARSWLFLRSQEYKKYQTNKTTGNTDKRAFVETWQSFYRKKLKEVWKPAV

SEQ ID NO: 49447 - protein, 980 aa, synthetic construct
  REGION 1..980: note = engineered CasX variant
QEIKRINKIRRRLVKDSNTKKAGKTGPMKTLLVRVMTPDLRERLENLRKKPENIPQPISNTSRANLNKLLTDYTEMKKAILHVYWEEFQKDPVGLMSRVAQPASKKIDQNKLKPEMDEKGNLTTAGFACSQCGQPLFVYKLEQVSEKGKAYTNYFGRCNVAEHEKLILLAQLKPEKDSDEAVTYSLGKFGQRALDFYSIHVTKESTHPVKPLAQIAGNRYASGPVGKALRDACMGTIASFLSKYQDIIIEHQKVVKGNQKRLESLRELAGKENLEYPSVTLPPQPHTKEGVDAYNEVIARVRMWVNLNLWQKLKLSRDDAKPLLRLKGFPSFPLVERQANEVDWWDMVCNVKKLINEKKEDGKVFWQNLAGYKRQEALRPYLSSEEDVRKKGKKFARYQLGDLLLHLEKKHGEYDWGKVYDEAWERIDKKVEGLSKHIKLEEERRSEDAQSKAALTDWLRAKASFVIEGLKEADKDEFCRCELKLQKWYGDLRGKPFAIEAENSILDISGFSKQYNCAFIWQKDGVKKLNLYLIINYFKGGKLRFKKIKPEAFEANRFYTVINKKSGEIVPMEVNFNFDDPNLIILPLAFGKRQGREFIWNDLLSLETGSLKLANGRVIEKTLYNRRTRQDEPALFVALTFERREVLDSSNIKPMNLIGVDRGENIPAVIALTDPEGCPLSRFKDSLGNPTHILRIGESYKEKQRTIQAKKEVEQRRAGGYSRKYASKAKNLADDMVRNTARDLLYYAVTQDAMLIFENLSRGFGRQGKRTFMAERQYTRMEDWLTAKLAYEGLPSKTYLSKTLAQYTSKTCSNCGFTITSADYDRVLEKLKKTATGWMTTINGKELKVEGQITYYNRYKRQNVVKDLSVELDRLSEESVNNDISSWTKGRSGEALSLLKKRFSHRPVQEKFVCLNCGFETHADEQAALNIARSWLFLRSQEYKKYQTNKTTGNTDKRAFVETWQSFYRKKLKEVWKPAV

SEQ ID NO: 49448 - protein, 979 aa, synthetic construct
  REGION 1..979: note = engineered CasX variant
QEIKRINKIRRRLVKDSNTKKAGKTGPMKTLLVRVMTPDLRERLENLRKKPENIPQPISNTSRANLNKLLTDYTEMKKAILHVYWEEFQKDPVGLMSRVAQPASKKIDQNKLKPEMDEKGNLTTAGFACSQCGQPLFVYKLEQVSEKGKAYTNYFGRCNVAEHEKLILLAQLKPEKDSDEAVTYSLGKFGQRALDFYSIHVTKESTHPVKPLAQIAGNRYASGPVGKALRDACMGTIASFLSKYQDIIIEHQKVVKGNQKRLESLRELAGKENLEYPSVTLPPQPHTKEGVDAYNEVIARVRMWVNLNLWQKLKLSRDDAKPLLRLKGFPSFPLVERQANEVDWWDMVCNVKKLINEKKEDGKVFWQNLAGYKRQEALRPYLSSEEDVRKKGKKFARYQLGDLLLHLEKKHGEDWGDVYDEAWERIDKKVEGLSKHIKLEEERRSEDAQSKAALTDWLRAKASFVIEGLKEADKDEFCRCELKLQKWYGDLRGKPFAIEAENSILDISGFSKQYNCAFIWQKDGVKKLNLYLIINYFKGGKLRFKKIKPEAFEANRFYTVINKKSGEIVPMEVNFNFDDPNLIILPLAFGKRQGREFIWNDLLSLETGSLKLANGRVIEKTLYNRRTRQDEPALFVALTFERREVLDSSNIKPMNLIGVDRGENIPAVIALTDPEGCPLSRFKDSLGNPTHILRIGESYKEKQRTIQAKKEVEQRRAGGYSRKYASKAKNLADDMVRNTARDLLYYAVTQDAMLIFENLSRGFGRQGKRTFMAERQYTRMEDWLTAKLAYEGLPSKTYLSKTLAQYTSKTCSNCGFTITSADYDRVLEKLKKTATGWMTTINGKELKVEGQITYYNRYKRQNVVKDLSVELDRLSEESVNNDISSWTKGRSGEALSLLKKRFSHRPVQEKFVCLNCGFETHADEQAALNIARSWLFLRSQEYKKYQTNKTTGNTDKRAFVETWQSFYRKKLKEVWKPAV

SEQ ID NO: 49449 - protein, 979 aa, synthetic construct
  REGION 1..979: note = engineered CasX variant
QEIKRINKIRRRLVKDSNTKKAGKTGPMKTLLVRVMTPDLRERLENLRKKPENIPQPISNTSRANLNKLLTDYTEMKKAILHVYWEEFQKDPVGLMSRVAQPASKKIDQNKLKPEMDEKGNLTTAGFACSQCGQPLFVYKLEQVSEKGKAYTNYFGRCNVAEHEKLILLAQLKPEKDSDEAVTYSLGKFGQRALDFYSIHVTKESTHPVKPLAQIAGNRYASGPVGKALRDACMGTIASFLSKYQDIIIEHQKVVKGNQKRLESLRELAGKENLEYPSVTLPPQPHTKEGVDAYNEVIARVRMWVNLNLWQKLKLSRDDAKPLLRLKGFPSFPLVERQANEVDWWDMVCNVKKLINEKKEDGKVFWQNLAGYKRQEALRPYLSSEEDVRKKGKKFARYQLGDLLLHLEKKHGEDWGKVYGEAWERIDKKVEGLSKHIKLEEERRSEDAQSKAALTDWLRAKASFVIEGLKEADKDEFCRCELKLQKWYGDLRGKPFAIEAENSILDISGFSKQYNCAFIWQKDGVKKLNLYLIINYFKGGKLRFKKIKPEAFEANRFYTVINKKSGEIVPMEVNFNFDDPNLIILPLAFGKRQGREFIWNDLLSLETGSLKLANGRVIEKTLYNRRTRQDEPALFVALTFERREVLDSSNIKPMNLIGVDRGENIPAVIALTDPEGCPLSRFKDSLGNPTHILRIGESYKEKQRTIQAKKEVEQRRAGGYSRKYASKAKNLADDMVRNTARDLLYYAVTQDAMLIFENLSRGFGRQGKRTFMAERQYTRMEDWLTAKLAYEGLPSKTYLSKTLAQYTSKTCSNCGFTITSADYDRVLEKLKKTATGWMTTINGKELKVEGQITYYNRYKRQNVVKDLSVELDRLSEESVNNDISSWTKGRSGEALSLLKKRFSHRPVQEKFVCLNCGFETHADEQAALNIARSWLFLRSQEYKKYQTNKTTGNTDKRAFVETWQSFYRKKLKEVWKPAV

SEQ ID NO: 49450 - protein, 979 aa, synthetic construct
  REGION 1..979: note = engineered CasX variant
QEIKRINKIRRRLVKDSNTKKAGKTGPMKTLLVRVMTPDLRERLENLRKKPENIPQPISNTSRANLNKLLTDYTEMKKAILHVYWEEFQKDPVGLMSRVAQPASKKIDQNKLKPEMDEKGNLTTAGFACSQCGQPLFVYKLEQVSEKGKAYTNYFGRCNVAEHEKLILLAQLKPEKDSDEAVTYSLGKFGQRALDFYSIHVTKESTHPVKPLAQIAGNRYASGPVGKALRDACMGTIASFLSKYQDIIIEHQKVVKGNQKRLESLRELAGKENLEYPSVTLPPQPHTKEGVDAYNEVIARVRMWVNLNLWQKLKLSRDDAKPLLRLKGFPSFPLVERQANEVDWWDMVCNVKKLINEKKEDGKVFWQNLAGYKRQEALRPYLSSEEDVRKKGKKFARYQLGDLLLHLEKKHGEDWGKVYDEAWERIDKKVEGLSKHIKLEEERRSEDAQSKAALTDWLRAKASFVIEGKKEADKDEFCRCELKLQKWYGDLRGKPFAIEAENSILDISGFSKQYNCAFIWQKDGVKKLNLYLIINYFKGGKLRFKKIKPEAFEANRFYTVINKKSGEIVPMEVNFNFDDPNLIILPLAFGKRQGREFIWNDLLSLETGSLKLANGRVIEKTLYNRRTRQDEPALFVALTFERREVLDSSNIKPMNLIGVDRGENIPAVIALTDPEGCPLSRFKDSLGNPTHILRIGESYKEKQRTIQAKKEVEQRRAGGYSRKYASKAKNLADDMVRNTARDLLYYAVTQDAMLIFENLSRGFGRQGKRTFMAERQYTRMEDWLTAKLAYEGLPSKTYLSKTLAQYTSKTCSNCGFTITSADYDRVLEKLKKTATGWMTTINGKELKVEGQITYYNRYKRQNVVKDLSVELDRLSEESVNNDISSWTKGRSGEALSLLKKRFSHRPVQEKFVCLNCGFETHADEQAALNIARSWLFLRSQEYKKYQTNKTTGNTDKRAFVETWQSFYRKKLKEVWKPAV

SEQ ID NO: 49451 - protein, 979 aa, synthetic construct
  REGION 1..979: note = engineered CasX variant
QEIKRINKIRRRLVKDSNTKKAGKTGPMKTLLVRVMTPDLRERLENLRKKPENIPQPISNTSRANLNKLLTDYTEMKKAILHVYWEEFQKDPVGLMSRVAQPASKKIDQNKLKPEMDEKGNLTTAGFACSQCGQPLFVYKLEQVSEKGKAYTNYFGRCNVAEHEKLILLAQLKPEKDSDEAVTYSLGKFGQRALDFYSIHVTKESTHPVKPLAQIAGNRYASGPVGKALRDACMGTIASFLSKYQDIIIEHQKVVKGNQKRLESLRELAGKENLEYPSVTLPPQPHTKEGVDAYNEVIARVRMWVNLNLWQKLKLSRDDAKPLLRLKGFPSFPLVERQANEVDWWDMVCNVKKLINEKKEDGKVFWQNLAGYKRQEALRPYLSSEEDVRKKGKKFARYQLGDLLLHLEKKHGEDWGKVYDEAWERIDKKVEGLSKHIKLEEERRSEDAQSKAALTDWLRAKASFVIEGSKEADKDEFCRCELKLQKWYGDLRGKPFAIEAENSILDISGFSKQYNCAFIWQKDGVKKLNLYLIINYFKGGKLRFKKIKPEAFEANRFYTVINKKSGEIVPMEVNFNFDDPNLIILPLAFGKRQGREFIWNDLLSLETGSLKLANGRVIEKTLYNRRTRQDEPALFVALTFERREVLDSSNIKPMNLIGVDRGENIPAVIALTDPEGCPLSRFKDSLGNPTHILRIGESYKEKQRTIQAKKEVEQRRAGGYSRKYASKAKNLADDMVRNTARDLLYYAVTQDAMLIFENLSRGFGRQGKRTFMAERQYTRMEDWLTAKLAYEGLPSKTYLSKTLAQYTSKTCSNCGFTITSADYDRVLEKLKKTATGWMTTINGKELKVEGQITYYNRYKRQNVVKDLSVELDRLSEESVNNDISSWTKGRSGEALSLLKKRFSHRPVQEKFVCLNCGFETHADEQAALNIARSWLFLRSQEYKKYQTNKTTGNTDKRAFVETWQSFYRKKLKEVWKPAV

SEQ ID NO: 49452 - protein, 980 aa, synthetic construct
  REGION 1..980: note = engineered CasX variant
QEIKRINKIRRRLVKDSNTKKAGKTGPMKTLLVRVMTPDLRERLENLRKKPENIPQPISNTSRANLNKLLTDYTEMKKAILHVYWEEFQKDPVGLMSRVAQPASKKIDQNKLKPEMDEKGNLTTAGFACSQCGQPLFVYKLEQVSEKGKAYTNYFGRCNVAEHEKLILLAQLKPEKDSDEAVTYSLGKFGQRALDFYSIHVTKESTHPVKPLAQIAGNRYASGPVGKALRDACMGTIASFLSKYQDIIIEHQKVVKGNQKRLESLRELAGKENLEYPSVTLPPQPHTKEGVDAYNEVIARVRMWVNLNLWQKLKLSRDDAKPLLRLKGFPSFPLVERQANEVDWWDMVCNVKKLINEKKEDGKVFWQNLAGYKRQEALRPYLSSEEDVRKKGKKFARYQLGDLLLHLEKKHGEDWGKVYDEAWERIDKKVEGLSKHIKLEEERRSEDAQSKAALTDWLRAKASFVIEGLKEADDKDEFCRCELKLQKWYGDLRGKPFAIEAENSILDISGFSKQYNCAFIWQKDGVKKLNLYLIINYFKGGKLRFKKIKPEAFEANRFYTVINKKSGEIVPMEVNFNFDDPNLIILPLAFGKRQGREFIWNDLLSLETGSLKLANGRVIEKTLYNRRTRQDEPALFVALTFERREVLDSSNIKPMNLIGVDRGENIPAVIALTDPEGCPLSRFKDSLGNPTHILRIGESYKEKQRTIQAKKEVEQRRAGGYSRKYASKAKNLADDMVRNTARDLLYYAVTQDAMLIFENLSRGFGRQGKRTFMAERQYTRMEDWLTAKLAYEGLPSKTYLSKTLAQYTSKTCSNCGFTITSADYDRVLEKLKKTATGWMTTINGKELKVEGQITYYNRYKRQNVVKDLSVELDRLSEESVNNDISSWTKGRSGEALSLLKKRFSHRPVQEKFVCLNCGFETHADEQAALNIARSWLFLRSQEYKKYQTNKTTGNTDKRAFVETWQSFYRKKLKEVWKPAV

SEQ ID NO: 49453 - protein, 980 aa, synthetic construct
  REGION 1..980: note = engineered CasX variant
QEIKRINKIRRRLVKDSNTKKAGKTGPMKTLLVRVMTPDLRERLENLRKKPENIPQPISNTSRANLNKLLTDYTEMKKAILHVYWEEFQKDPVGLMSRVAQPASKKIDQNKLKPEMDEKGNLTTAGFACSQCGQPLFVYKLEQVSEKGKAYTNYFGRCNVAEHEKLILLAQLKPEKDSDEAVTYSLGKFGQRALDFYSIHVTKESTHPVKPLAQIAGNRYASGPVGKALRDACMGTIASFLSKYQDIIIEHQKVVKGNQKRLESLRELAGKENLEYPSVTLPPQPHTKEGVDAYNEVIARVRMWVNLNLWQKLKLSRDDAKPLLRLKGFPSFPLVERQANEVDWWDMVCNVKKLINEKKEDGKVFWQNLAGYKRQEALRPYLSSEEDVRKKGKKFARYQLGDLLLHLEKKHGEDWGKVYDEAWERIDKKVEGLSKHIKLEEERRSEDAQSKAALTDWLRAKASFVIEGLKEADKDEFCRCELKLQKWYGDLRGKPFAIEAENSILDISGFSKQYNCAFIWQKDGVKKLNLYLIINYFKGGKLRFKKIKPEAFEANRFYTVINKKSGEIVPMEVNFNFDDPNLIILPLAFGKRQGREFIWNDLLSLETGSLKLANGRVIEKTLYNRRTRQDEPALFVALTFERREVLDSSNIKPMNLIGVDRGENIPAVIALTDPEGCPLSRFKDSLGNPTHILRIGESYKEKQRTIQAKKEVEQRRAGGYSRKYASKAKNLADDMVRNTARDLLYYAVTQDAMLIFENLSRGFGRQGKRTFMAERQYTRMEDWLTAKLAYEGLPSKTYLSKTLAQYTSKTCSNCGFTITSADYDRVLEKLKKTATGWMTTINGKELKVEGQITYYNRYKRQNVVKDLSVELDRLSEESVNNDISSWTKGRSGNEALSLLKKRFSHRPVQEKFVCLNCGFETHADEQAALNIARSWLFLRSQEYKKYQTNKTTGNTDKRAFVETWQSFYRKKLKEVWKPAV

SEQ ID NO: 49454 - protein, 979 aa, synthetic construct
  REGION 1..979: note = engineered CasX variant
QEIKRINKIRRRLVKDSNTKKAGKTGPMKTLLVRVMTPDLRERLENLRKKPENIPQPISNTSRANLNKLLTDYTEMKKAILHVYWEEFQKDPVGLMSRVAQPASKKIDQNKLKPEMDEKGNLTTAGFACSQCGQPLFVYKLEQVSEKGKAYTNYFGRCNVAEHEKLILLAQLKPEKDSDEAVTYSLGKFGQRALDFYSIHVTKESTHPVKPLAQIAGNRYASGPVGKALRDACMGTIASFLSKYQDIIIEHQKVVKGNQKRLESLRELAGKENLEYPSVTLPPQPHTKEGVDAYNEVIARVRMWVNLNLWQKLKLSRDDAKPLLRLKGFPSFPLVERQANEVDWWDMVCNVKKLINEKKEDGKVFWQNLAGYKRQEALRPYLSSEEDVRQKGKKFARYQLGDLLLHLEKKHGEDWGKVYDEAWERIDKKVEGLSKHIKLEEERRSEDAQSKAALTDWLRAKASFVIEGLKEADKDEFCRCELKLQKWYGDLRGKPFAIEAENSILDISGFSKQYNCAFIWQKDGVKKLNLYLIINYFKGGKLRFKKIKPEAFEANRFYTVINKKSGEIVPMEVNFNFDDPNLIILPLAFGKRQGREFIWNDLLSLETGSLKLANGRVIEKTLYNRRTRQDEPALFVALTFERREVLDSSNIKPMNLIGVDRGENIPAVIALTDPEGCPLSRFKDSLGNPTHILRIGESYKEKQRTIQAKKEVEQRRAGGYSRKYASKAKNLADDMVRNTARDLLYYAVTQDAMLIFENLSRGFGRQGKRTFMAERQYTRMEDWLTAKLAYEGLPSKTYLSKTLAQYTSKTCSNCGFTITSADYDRVLEKLKKTATGWMTTINGKELKVEGQITYYNRYKRQNVVKDLSVELDRLSEESVNNDISSWTKGRSGEALSLLKKRFSHRPVQEKFVCLNCGFETHADEQAALNIARSWLFLRSQEYKKYQTNKTTGNTDKRAFVETWQSFYRKKLKEVWKPAV

SEQ ID NO: 49455 - protein, 979 aa, synthetic construct
  REGION 1..979: note = engineered CasX variant
QEIKRINKIRRRLVKDSNTKKAGKTGPMKTLLVRVMTPDLRERLENLRKKPENIPQPISNTSRANLNKLLTDYTEMKKAILHVYWEEFQKDPVGLMSRVAQPASKKIDQNKLKPEMDEKGNLTTAGFACSQCGQPLFVYKLEQVSEKGKAYTNYFGRCNVAEHEKLILLAQLKPEKDSDEAVTYSLGKFGQRALDFYSIHVTKESTHPVKPLAQIAGNRYASGPVGKALRDACMGTIASFLSKYQDIIIEHQKVVKGNQKRLESLRELAGKENLEYPSVTLPPQPHTKEGVDAYNEVIARVRMWVNLNLWQKLKLSRDDAKPLLRLKGFPSFPLVERQANEVDWWDMVCNVKKLINEKKEDGKVFWQNLAGYKRQEALRPYLSSEEDVRKKGKKFARYQLGDLLLHLEKKHGEDWGKVYDEAWERIDKKVEGLSKHIKLEEERRSEDAQSKAALTDWLRAKASFVIEGLKEADKDEFCRCELKLQKWYGDLRGKPFAIEAENSILDISGFSKQYNCAFIWQKDGVKKLNLYLIINYFKGGKLRFKKIKPEAFEANRFYTVINKKSGEIVPMEVNFNFDDPNLIILPLAFGKRQGREFIWNDLLSLETGSLKLANGRVIEKTLYNRRTRQDEPALFVALTFERREVLDSSNIKPMNLIGVDRGENIPAVIALTDPEGCPLSRFKDSLGNPTHILRIGESYKEKQRTIQAKKEVEQRRAGGYSRKYASKAKNLADDMVRNTARDLLYYAVTQDAMLIFENLSRGFGRQGKRTFMAERQYTRMEDWLTAKLAYEGLPSQTYLSKTLAQYTSKTCSNCGFTITSADYDRVLEKLKKTATGWMTTINGKELKVEGQITYYNRYKRQNVVKDLSVELDRLSEESVNNDISSWTKGRSGEALSLLKKRFSHRPVQEKFVCLNCGFETHADEQAALNIARSWLFLRSQEYKKYQTNKTTGNTDKRAFVETWQSFYRKKLKEVWKPAV

SEQ ID NO: 49456 - protein, 979 aa, synthetic construct
  REGION 1..979: note = engineered CasX variant
QEIKRINKIRRRLVKDSNTKKAGKTGPMKTLLVRVMTPDLRERLENLRKKPENIPQPISNTSRANLNKLLTDYTEMKKAILHVYWEEFQKDPVGLMSRVAQPASKKIDQNKLKPEMDEKGNLTTAGFACSQCGQPLFVYKLEQVSEKGKAYTNYFGRCNVAEHEKLILLAQLKPEKDSDEAVTYSLGKFGQRALDFYSIHVTKESTHPVKPLAQIAGNRYASGPVGKALRDACMGTIASFLSKYQDIIIEHQKVVKGNQKRLESLRELAGKENLEYPSVTLPPQPHTKEGVDAYNEVIARVRMWVNLNLWQKLKLSRDDAKPLLRLKGFPSFPLVERQANEVDWWDMVCNVKKLINEKKEDGKVFWQNLAGYKRQEALRPYLSSEEDVRKKGKKFARYQLGDLLLHLEKKHGEDWGKVYDEAWERIDKKVEGLSKHIKLEEERRSEDAQSKAALTDWLRAKASFVIEGLKEADKDEFCRCELKLQKWYGDLRGKPFAIEAENSILDISGFSKQYNCAFIWQKDGVKKLNLYLIINYFKGGKLRFKKIKPEAFEANRFYTVINKKSGEIVPMEVNFNFDDPNLIILPLAFGKRQGREFIWNDLLSLETGSLKLANGRVIEKTLYNRRTRQDEPALFVALTFERREVLDSSNIKPMNLIGVDRGENIPAVIALTDPEGCPLSRFKDSLGNPTHILRIGESYKEKQRTIQAKKEVEQRRAGGYSRKYASKAKNLADDMVRNTARDLLYYAVTQDAMLIFENLSRGFGRQGKRTFMAERQYTRMEDWLTAKLAYNGLPSKTYLSKTLAQYTSKTCSNCGFTITSADYDRVLEKLKKTATGWMTTINGKELKVEGQITYYNRYKRQNVVKDLSVELDRLSEESVNNDISSWTKGRSGEALSLLKKRFSHRPVQEKFVCLNCGFETHADEQAALNIARSWLFLRSQEYKKYQTNKTTGNTDKRAFVETWQSFYRKKLKEVWKPAV

SEQ ID NO: 49457 - protein, 979 aa, synthetic construct
  REGION 1..979: note = engineered CasX variant
QEIKRINKIRRRLVKDSNTKKAGKTGPMKTLLVRVMTPDLRERLENLRKKPENIPQPISNTSRANLNKLLTDYTEMKKAILHVYWEEFQKDPVGLMSRVAQPASKKIDQNKLKPEMDEKGNLTTAGFACSQCGQPLFVYKLEQVSEKGKAYTNYFGRCNVAEHEKLIQLAQLKPEKDSDEAVTYSLGKFGQRALDFYSIHVTKESTHPVKPLAQIAGNRYASGPVGKALRDACMGTIASFLSKYQDIIIEHQKVVKGNQKRLESLRELAGKENLEYPSVTLPPQPHTKEGVDAYNEVIARVRMWVNLNLWQKLKLSRDDAKPLLRLKGFPSFPLVERQANEVDWWDMVCNVKKLINEKKEDGKVFWQNLAGYKRQEALRPYLSSEEDVRKKGKKFARYQLGDLLLHLEKKHGEDWGKVYDEAWERIDKKVEGLSKHIKLEEERRSEDAQSKAALTDWLRAKASFVIEGLKEADKDEFCRCELKLQKWYGDLRGKPFAIEAENSILDISGFSKQYNCAFIWQKDGVKKLNLYLIINYFKGGKLRFKKIKPEAFEANRFYTVINKKSGEIVPMEVNFNFDDPNLIILPLAFGKRQGREFIWNDLLSLETGSLKLANGRVIEKTLYNRRTRQDEPALFVALTFERREVLDSSNIKPMNLIGVDRGENIPAVIALTDPEGCPLSRFKDSLGNPTHILRIGESYKEKQRTIQAKKEVEQRRAGGYSRKYASKAKNLADDMVRNTARDLLYYAVTQDAMLIFENLSRGFGRQGKRTFMAERQYTRMEDWLTAKLAYEGLPSKTYLSKTLAQYTSKTCSNCGFTITSADYDRVLEKLKKTATGWMTTINGKELKVEGQITYYNRYKRQNVVKDLSVELDRLSEESVNNDISSWTKGRSGEALSLLKKRFSHRPVQEKFVCLNCGFETHADEQAALNIARSWLFLRSQEYKKYQTNKTTGNTDKRAFVETWQSFYRKKLKEVWKPAV

SEQ ID NO: 49458 - protein, 979 aa, synthetic construct
  REGION 1..979: note = engineered CasX variant
QEIKRINKIRRRLVKDSNTKKAGKTGPMKTLLVRVMTPDLRERLENLRKKPENIPQPISNTSRANLNKLLTDYTEMKKAILHVYWEEFQKDPVGLMSRVAQPASKKIDQNKLKPEMDEKGNLTTAGFACSQCGQPLFVYKLEQVSEKGKAYTNYFGRCNVAEHEKLILLAQLKPEKDSDEAVTYSLGKFGQRALDFYSIHVTKESTHPVKPLAQIAGNRYASGPVGKALRDACMGTIASFLSKYQDIIIEHQKVVKGNQKRLESLRELAGKENLEYPSVTLPPQPHTKEGVDAYNEVIARVRMWVNLNLWQKLKLSRDDAKPLLRLKGFPSFPLVERQANEVDWWDMVCNVKKLINEKKEDGKVFWQNLAIYKRQEALRPYLSSEEDVRKKGKKFARYQLGDLLLHLEKKHGEDWGKVYDEAWERIDKKVEGLSKHIKLEEERRSEDAQSKAALTDWLRAKASFVIEGLKEADKDEFCRCELKLQKWYGDLRGKPFAIEAENSILDISGFSKQYNCAFIWQKDGVKKLNLYLIINYFKGGKLRFKKIKPEAFEANRFYTVINKKSGEIVPMEVNFNFDDPNLIILPLAFGKRQGREFIWNDLLSLETGSLKLANGRVIEKTLYNRRTRQDEPALFVALTFERREVLDSSNIKPMNLIGVDRGENIPAVIALTDPEGCPLSRFKDSLGNPTHILRIGESYKEKQRTIQAKKEVEQRRAGGYSRKYASKAKNLADDMVRNTARDLLYYAVTQDAMLIFENLSRGFGRQGKRTFMAERQYTRMEDWLTAKLAYEGLPSKTYLSKTLAQYTSKTCSNCGFTITSADYDRVLEKLKKTATGWMTTINGKELKVEGQITYYNRYKRQNVVKDLSVELDRLSEESVNNDISSWTKGRSGEALSLLKKRFSHRPVQEKFVCLNCGFETHADEQAALNIARSWLFLRSQEYKKYQTNKTTGNTDKRAFVETWQSFYRKKLKEVWKPAV

SEQ ID NO: 49459 - protein, 979 aa, synthetic construct
  REGION 1..979: note = engineered CasX variant
QEIKRINKIRRRLVKDSNTKKAGKTGPMKTLLVRVMTPDLRERLENLRKKPENIPQPISNTSRANLNKLLTDYTEMKKAILHVYWEEFQKDPVGLMSRVAQPASKKIDQNKLKPEMDEKGNLTTAGFACSQCGQPLFVYKLEQVSEKGKAYTNYFGRCNVAEHEKLILLAQLKPEKDSDEAVTYSLGKFGQRALDFYSIHVTKESTHPVKPLAQIAGNRYASGPVGKALRDACMGTIASFLSKYQDIIIEHQKVVKGNQKRLESLRELAGKENLEYPSVTLPPQPHTKEGVDAYNEVIARVRMWVNLNLWQKLKLSRDDAKPLLRLKGFPSFPLVERQANEVDWWDMVCNVKKLINEKKEDGKVFWQNLAGYKRQEALRPYLSSEEDVREKGKKFARYQLGDLLLHLEKKHGEDWGKVYDEAWERIDKKVEGLSKHIKLEEERRSEDAQSKAALTDWLRAKASFVIEGLKEADKDEFCRCELKLQKWYGDLRGKPFAIEAENSILDISGFSKQYNCAFIWQKDGVKKLNLYLIINYFKGGKLRFKKIKPEAFEANRFYTVINKKSGEIVPMEVNFNFDDPNLIILPLAFGKRQGREFIWNDLLSLETGSLKLANGRVIEKTLYNRRTRQDEPALFVALTFERREVLDSSNIKPMNLIGVDRGENIPAVIALTDPEGCPLSRFKDSLGNPTHILRIGESYKEKQRTIQAKKEVEQRRAGGYSRKYASKAKNLADDMVRNTARDLLYYAVTQDAMLIFENLSRGFGRQGKRTFMAERQYTRMEDWLTAKLAYEGLPSKTYLSKTLAQYTSKTCSNCGFTITSADYDRVLEKLKKTATGWMTTINGKELKVEGQITYYNRYKRQNVVKDLSVELDRLSEESVNNDISSWTKGRSGEALSLLKKRFSHRPVQEKFVCLNCGFETHADEQAALNIARSWLFLRSQEYKKYQTNKTTGNTDKRAFVETWQSFYRKKLKEVWKPAV

SEQ ID NO: 49460 - protein, 979 aa, synthetic construct
  REGION 1..979: note = engineered CasX variant
QEIKRINKIRRRLVKDSNTKKAGKTGPMKTLLVRVMTPDLRERLENLRKKPENIPQPISNTSRANLNKLLTDYTEMKKAILHVYWEEFQKDPVGLMSRVAQPASKKIDQNKLKPEMDEKGNLTTAGFACSQCGQPLFVYKLEQVSEKGKAYTNYFGRCNVAEHEKLILLAQLKPEKDSDEAVTYSLGKFGQRALDFYSIHVTKESTHPVKPLAQIAGNRYASGPVGKALRDACMGTIASFLSKYQDIIIEHQKVVKGNQKRLESLRELAGKENLEYPSVTLPPQPHTKEGVDAYNEVIARVRMWVNLNLWQKLKLSRDDAKPLLRLKGFPSFPLVERQANEVDWWDMVCNVKKLINEKKEDGKVFWQNLAGYKRQEALRPYLSSEEDVRKKGKKFARYQLGDLLLHLEKKHGEDWGKVYDEAWERIDKKVEGLSKHIKLEEERRSEDAQSKAALTDWLRAKASFVIEGLKEADKDEFCRCELKLQKWYGDLRGKPFAIEAENSILDISGFSKQYNCAFIWQKDGVKKLNLYLIINYFKGGKLRFKKIKPEAFEANRFYTVINKKSGEIVIMEVNFNFDDPNLIILPLAFGKRQGREFIWNDLLSLETGSLKLANGRVIEKTLYNRRTRQDEPALFVALTFERREVLDSSNIKPMNLIGVDRGENIPAVIALTDPEGCPLSRFKDSLGNPTHILRIGESYKEKQRTIQAKKEVEQRRAGGYSRKYASKAKNLADDMVRNTARDLLYYAVTQDAMLIFENLSRGFGRQGKRTFMAERQYTRMEDWLTAKLAYEGLPSKTYLSKTLAQYTSKTCSNCGFTITSADYDRVLEKLKKTATGWMTTINGKELKVEGQITYYNRYKRQNVVKDLSVELDRLSEESVNNDISSWTKGRSGEALSLLKKRFSHRPVQEKFVCLNCGFETHADEQAALNIARSWLFLRSQEYKKYQTNKTTGNTDKRAFVETWQSFYRKKLKEVWKPAV

SEQ ID NO: 49461 - protein, 978 aa, synthetic construct
  REGION 1..978: note = engineered CasX variant
QEIKRINKIRRRLVKDSNTKKAGKTGPMKTLLVRVMTPDLRERLENLRKKPENIPQPISNTSRANLNKLLTDYTEMKKAILHVYWEEFQKDPVGLMSRVAQPASKKIDQNKLKPEMDEKGNLTTAGFACSQCGQPLFVYKLEQVSEKGKAYTNYFGRCNVAEHEKLILLAQLKPEKDSDEAVTYSLGKFGQRALDFYSIHVTKESTHPVKPLAQIAGNRYASGPVGKALRGACMGTIASFLSKYQDIIIEHQKVVKGNQKRLESLRELAGKENLEYPSVTLPPQPHTKEGVDAYNEVIARVRMWVNLNLWQKLKLSRDDAKPLLRLKGFPSFPLVERQANEVDWWDMVCNVKKLINEKKEDGKVFWQNLAGYKRQEALRPYLSSEEDRKKGKKFARYQLGDLLLHLEKKHGEDWGKVYDEAWERIDKKVEGLSKHIKLEEERRSEDAQSKAALTDWLRAKASFVIEGLKEADKDEFCRCELKLQKWYGDLRGKPFAIEAENSILDISGFSKQYNCAFIWQKDGVKKLNLYLIINYFKGGKLRFKKIKPEAFEANRFYTVINKKSGEIVPMEVNFNFDDPNLIILPLAFGKRQGREFIWNDLLSLETGSLKLANGRVIEKTLYNRRTRQDEPALFVALTFERREVLDSSNIKPMNLIGVDRGENIPAVIALTDPEGCPLSRFKDSLGNPTHILRIGESYKEKQRTIQAKKEVEQRRAGGYSRKYASKAKNLADDMVRNTARDLLYYAVTQDAMLIFENLSRGFGRQGKRTFMAERQYTRMEDWLTAKLAYEGLPSKTYLSKTLAQYTSKTCSNCGFTITSADYDRMLEKLKKTATGWMTTINGKELKVEGQITYYNRYKRQNVVKDLSVELDRLSEESVNNDISSWTKGRSGEALSLLKKRFSHRPVQEKFVCLNCGFETHADEQAALNIARSWLFLRSQEYKKYQTNKTTGNTDKRAFVETWQSFYRKKLKEVWKPAV

SEQ ID NO: 49462 - protein, 978 aa, synthetic construct
  REGION 1..978: note = engineered CasX variant
QEIKRINKIRRRLVKDSNTKKAGKTGPMKTLLVRVMTPDLRERLENLRKKPENIPQPISNTSRANLNKLLTDYTEMKKAILHVYWEEFQKDPVGLMSRVAQPASKKIDQNKLKPEMDEKGNLTTAGFACSQCGQPLFVYKLEQVSEKGKAYTNYFGRCNVAEHEKLILLAQLKPEKDSDEAVTYSLGKFGQRALDFYSIHVTKESTHPVKPLAQIAGNRYASGPVGKALRDACMGTIASFLSKYQDIIIEHQKVVKGNQKRLESLRELAGKENLEYPSVTLPPQPHTKEGVDAYNEVIARVRMWVNLNLWQKLKLSRDDAKPLLRLKNFPSFPLVERQANEVDWWDMVCNVKKLINEKKEDGKVFWQNLAGYKRQEALRPYLSSEEDRKKGKKFARYQLGDLLLHLEKKHGEDWGKVYDEAWERIDKKVEGLSKHIKLEEERRSEDAQSKAALTDWLRAKASFVIEGLKEADKDEFCRCELKLQKWYGDLRGKPFAIEAENSILDISGFSKQYNCAFIWQKDGVKKLNLYLIINYFKGGKLRFKKIKPEAFEANRFYTVINKKSGEIVPMEVNFNFDDPNLIILPLAFGKRQGREFIWNDLLSLETGSLKLANGRVIEKTLYNRRTRQDEPALFVALTFERREVLDSSNIKPMNLIGVDRGENIPAVIALTDPEGCPLSRFKDSLGNPTHILRIGESYKEKQRTIQAKKEVEQRRAGGYSRKYASKAKNLADDMVRNTARDLLYYAVTQDAMLIFENLSRGFGRQGKRTFMAERQYTRMEDWLTAKLAYEGLPSKTYLSKTLAQYTSKTCSNCGFTITSADYDRMLEKLKKTATGWMTTINGKELKVEGQITYYNRYKRQNVVKDLSVELDRLSEESVNNDISSWTKGRSGEALSLLKKRFSHRPVQEKFVCLNCGFETHADEQAALNIARSWLFLRSQEYKKYQTNKTTGNTDKRAFVETWQSFYRKKLKEVWKPAV

SEQ ID NO: 49463 - protein, 978 aa, synthetic construct
  REGION 1..978: note = engineered CasX variant
QEIKRINKIRRRLVKDSNTKKAGKTGPMKTLLVRVMTPDLRERLENLRKKPENIPQPISNTSRANLNKLLTDYTEMKKAILHVYWEEFQKDPVGLMSRVAQPASKKIDQNKLKPEMDEKGNLTTAGFACSQCGQPLFVYKLEQVSEKGKAYTNYFGRCNVAEHEKLILLAQLKPEKDSDEAVTYSLGKFGQRALDFYSIHVTKESTHPVKPLAQIAGNRYASGPVGKALRDACMGTIASFLSKYQDIIIEHQKVVKGNQKRLESLRELAGKENLEYPSVTLPPQPHTKEGVDAYNEVIARVRMWVNLNLWQKLKLSRDDAKPLLRLKGFPSFPLVERQANEVDWWDMVCNVKKLINEKKEDGKVFWQNLAGYKRQEALRPYLSSEEDRKKGKKFARYQLGDLLNHLEKKHGEDWGKVYDEAWERIDKKVEGLSKHIKLEEERRSEDAQSKAALTDWLRAKASFVIEGLKEADKDEFCRCELKLQKWYGDLRGKPFAIEAENSILDISGFSKQYNCAFIWQKDGVKKLNLYLIINYFKGGKLRFKKIKPEAFEANRFYTVINKKSGEIVPMEVNFNFDDPNLIILPLAFGKRQGREFIWNDLLSLETGSLKLANGRVIEKTLYNRRTRQDEPALFVALTFERREVLDSSNIKPMNLIGVDRGENIPAVIALTDPEGCPLSRFKDSLGNPTHILRIGESYKEKQRTIQAKKEVEQRRAGGYSRKYASKAKNLADDMVRNTARDLLYYAVTQDAMLIFENLSRGFGRQGKRTFMAERQYTRMEDWLTAKLAYEGLPSKTYLSKTLAQYTSKTCSNCGFTITSADYDRMLEKLKKTATGWMTTINGKELKVEGQITYYNRYKRQNVVKDLSVELDRLSEESVNNDISSWTKGRSGEALSLLKKRFSHRPVQEKFVCLNCGFETHADEQAALNIARSWLFLRSQEYKKYQTNKTTGNTDKRAFVETWQSFYRKKLKEVWKPAV

SEQ ID NO: 49464 - protein, 978 aa, synthetic construct
  REGION 1..978: note = engineered CasX variant
QEIKRINKIRRRLVKDSNTKKAGKTGPMKTLLVRVMTPDLRERLENLRKKPENIPQPISNTSRANLNKLLTDYTEMKKAILHVYWEEFQKDPVGLMSRVAQPASKKIDQNKLKPEMDEKGNLTTAGFACSQCGQPLFVYKLEQVSEKGKAYTNYFGRCNVAEHEKLILLAQLKPEKDSDEAVTYSLGKFGQRALDFYSIHVTKESTHPVKPLAQIAGNRYASGPVGKALRDACMGTIASFLSKYQDIIIEHQKVVKGNQKRLESLRELAGKENLEYPSVTLPPQPHTKEGVDAYNEVIARVRMWVNLNLWQKLKLSRDDAKPLLRLKGFPSFPLVERQANEVDWWDMVCNVKKLINEKKEDGKVFWQNLAGYKRQEALRPYLSSEEDRKKGKKFARYQLGDLLWHLEKKHGEDWGKVYDEAWERIDKKVEGLSKHIKLEEERRSEDAQSKAALTDWLRAKASFVIEGLKEADKDEFCRCELKLQKWYGDLRGKPFAIEAENSILDISGFSKQYNCAFIWQKDGVKKLNLYLIINYFKGGKLRFKKIKPEAFEANRFYTVINKKSGEIVPMEVNFNFDDPNLIILPLAFGKRQGREFIWNDLLSLETGSLKLANGRVIEKTLYNRRTRQDEPALFVALTFERREVLDSSNIKPMNLIGVDRGENIPAVIALTDPEGCPLSRFKDSLGNPTHILRIGESYKEKQRTIQAKKEVEQRRAGGYSRKYASKAKNLADDMVRNTARDLLYYAVTQDAMLIFENLSRGFGRQGKRTFMAERQYTRMEDWLTAKLAYEGLPSKTYLSKTLAQYTSKTCSNCGFTITSADYDRMLEKLKKTATGWMTTINGKELKVEGQITYYNRYKRQNVVKDLSVELDRLSEESVNNDISSWTKGRSGEALSLLKKRFSHRPVQEKFVCLNCGFETHADEQAALNIARSWLFLRSQEYKKYQTNKTTGNTDKRAFVETWQSFYRKKLKEVWKPAV

SEQ ID NO: 49465 - protein, 978 aa, synthetic construct
  REGION 1..978: note = engineered CasX variant
QEIKRINKIRRRLVKDSNTKKAGKTGPMKTLLVRVMTPDLRERLENLRKKPENIPQPISNTSRANLNKLLTDYTEMKKAILHVYWEEFQKDPVGLMSRVAQPASKKIDQNKLKPEMDEKGNLTTAGFACSQCGQPLFVYKLEQVSEKGKAYTNYFGRCNVAEHEKLILLAQLKPEKDSDEAVTYSLGKFGQRALDFYSIHVTKESTHPVKPLAQIAGNRYASGPVGKALRDACMGTIASFLSKYQDIIIEHQKVVKGNQKRLESLRELAGKENLEYPSVTLPPQPHTKEGVDAYNEVIARVRMWVNLNLWQKLKLSRDDAKPLLRLKGFPSFPLVERQANEVDWWDMVCNVKKLINEKKEDGKVFWQNLAGYKRQEALRPYLSSEEDRKKGKKFARYQLGDLLLHLYKKHGEDWGKVYDEAWERIDKKVEGLSKHIKLEEERRSEDAQSKAALTDWLRAKASFVIEGLKEADKDEFCRCELKLQKWYGDLRGKPFAIEAENSILDISGFSKQYNCAFIWQKDGVKKLNLYLIINYFKGGKLRFKKIKPEAFEANRFYTVINKKSGEIVPMEVNFNFDDPNLIILPLAFGKRQGREFIWNDLLSLETGSLKLANGRVIEKTLYNRRTRQDEPALFVALTFERREVLDSSNIKPMNLIGVDRGENIPAVIALTDPEGCPLSRFKDSLGNPTHILRIGESYKEKQRTIQAKKEVEQRRAGGYSRKYASKAKNLADDMVRNTARDLLYYAVTQDAMLIFENLSRGFGRQGKRTFMAERQYTRMEDWLTAKLAYEGLPSKTYLSKTLAQYTSKTCSNCGFTITSADYDRMLEKLKKTATGWMTTINGKELKVEGQITYYNRYKRQNVVKDLSVELDRLSEESVNNDISSWTKGRSGEALSLLKKRFSHRPVQEKFVCLNCGFETHADEQAALNIARSWLFLRSQEYKKYQTNKTTGNTDKRAFVETWQSFYRKKLKEVWKPAV

SEQ ID NO: 49466 - protein, 978 aa, synthetic construct
  REGION 1..978: note = engineered CasX variant
QEIKRINKIRRRLVKDSNTKKAGKTGPMKTLLVRVMTPDLRERLENLRKKPENIPQPISNTSRANLNKLLTDYTEMKKAILHVYWEEFQKDPVGLMSRVAQPASKKIDQNKLKPEMDEKGNLTTAGFACSQCGQPLFVYKLEQVSEKGKAYTNYFGRCNVAEHEKLILLAQLKPEKDSDEAVTYSLGKFGQRALDFYSIHVTKESTHPVKPLAQIAGNRYASGPVGKALRDACMGTIASFLSKYQDIIIEHQKVVKGNQKRLESLRELAGKENLEYPSVTLPPQPHTKEGVDAYNEVIARVRMWVNLNLWQKLKLSRDDAKPLLRLKGFPSFPLVERQANEVDWWDMVCNVKKLINEKKEDGKVFWQNLAGYKRQEALRPYLSSEEDRKKGKKFARYQLGDLLLHLEKKHPEDWGKVYDEAWERIDKKVEGLSKHIKLEEERRSEDAQSKAALTDWLRAKASFVIEGLKEADKDEFCRCELKLQKWYGDLRGKPFAIEAENSILDISGFSKQYNCAFIWQKDGVKKLNLYLIINYFKGGKLRFKKIKPEAFEANRFYTVINKKSGEIVPMEVNFNFDDPNLIILPLAFGKRQGREFIWNDLLSLETGSLKLANGRVIEKTLYNRRTRQDEPALFVALTFERREVLDSSNIKPMNLIGVDRGENIPAVIALTDPEGCPLSRFKDSLGNPTHILRIGESYKEKQRTIQAKKEVEQRRAGGYSRKYASKAKNLADDMVRNTARDLLYYAVTQDAMLIFENLSRGFGRQGKRTFMAERQYTRMEDWLTAKLAYEGLPSKTYLSKTLAQYTSKTCSNCGFTITSADYDRMLEKLKKTATGWMTTINGKELKVEGQITYYNRYKRQNVVKDLSVELDRLSEESVNNDISSWTKGRSGEALSLLKKRFSHRPVQEKFVCLNCGFETHADEQAALNIARSWLFLRSQEYKKYQTNKTTGNTDKRAFVETWQSFYRKKLKEVWKPAV

SEQ ID NO: 49467 - protein, 979 aa, synthetic construct
  REGION 1..979: note = engineered CasX variant
QEIKRINKIRRRLVKDSNTKKAGKTGPMKTLLVRVMTPDLRERLENLRKKPENIPQPISNTSRANLNKLLTDYTEMKKAILHVYWEEFQKDPVGLMSRVAQPASKKIDQNKLKPEMDEKGNLTTAGFACSQCGQPLFVYKLEQVSEKGKAYTNYFGRCNVAEHEKLILLAQLKPEKDSDEAVTYSLGKFGQRALDFYSIHVTKESTHPVKPLAQIAGNRYASGPVGKALRDACMGTIASFLSKYQDIIIEHQKVVKGNQKRLESLRELAGKENLEYPSVTLPPQPHTKEGVDAYNEVIARVRMWVNLNLWQKLKLSRDDAKPLLRLKGFPSFPLVERQANEVDWWDMVCNVKKLINEKKEDGKVFWQNLAGYKRQEALRPYLSSEEDRKKGKKFARYQLGDLLLHLEKKHGERDWGKVYDEAWERIDKKVEGLSKHIKLEEERRSEDAQSKAALTDWLRAKASFVIEGLKEADKDEFCRCELKLQKWYGDLRGKPFAIEAENSILDISGFSKQYNCAFIWQKDGVKKLNLYLIINYFKGGKLRFKKIKPEAFEANRFYTVINKKSGEIVPMEVNFNFDDPNLIILPLAFGKRQGREFIWNDLLSLETGSLKLANGRVIEKTLYNRRTRQDEPALFVALTFERREVLDSSNIKPMNLIGVDRGENIPAVIALTDPEGCPLSRFKDSLGNPTHILRIGESYKEKQRTIQAKKEVEQRRAGGYSRKYASKAKNLADDMVRNTARDLLYYAVTQDAMLIFENLSRGFGRQGKRTFMAERQYTRMEDWLTAKLAYEGLPSKTYLSKTLAQYTSKTCSNCGFTITSADYDRMLEKLKKTATGWMTTINGKELKVEGQITYYNRYKRQNVVKDLSVELDRLSEESVNNDISSWTKGRSGEALSLLKKRFSHRPVQEKFVCLNCGFETHADEQAALNIARSWLFLRSQEYKKYQTNKTTGNTDKRAFVETWQSFYRKKLKEVWKPAV

SEQ ID NO: 49468 - protein, 979 aa, synthetic construct
  REGION 1..979: note = engineered CasX variant
QEIKRINKIRRRLVKDSNTKKAGKTGPMKTLLVRVMTPDLRERLENLRKKPENIPQPISNTSRANLNKLLTDYTEMKKAILHVYWEEFQKDPVGLMSRVAQPASKKIDQNKLKPEMDEKGNLTTAGFACSQCGQPLFVYKLEQVSEKGKAYTNYFGRCNVAEHEKLILLAQLKPEKDSDEAVTYSLGKFGQRALDFYSIHVTKESTHPVKPLAQIAGNRYASGPVGKALRDACMGTIASFLSKYQDIIIEHQKVVKGNQKRLESLRELAGKENLEYPSVTLPPQPHTKEGVDAYNEVIARVRMWVNLNLWQKLKLSRDDAKPLLRLKGFPSFPLVERQANEVDWWDMVCNVKKLINEKKEDGKVFWQNLAGYKRQEALRPYLSSEEDRKKGKKFARYQLGDLLLHLEKKHGEYDWGKVYDEAWERIDKKVEGLSKHIKLEEERRSEDAQSKAALTDWLRAKASFVIEGLKEADKDEFCRCELKLQKWYGDLRGKPFAIEAENSILDISGFSKQYNCAFIWQKDGVKKLNLYLIINYFKGGKLRFKKIKPEAFEANRFYTVINKKSGEIVPMEVNFNFDDPNLIILPLAFGKRQGREFIWNDLLSLETGSLKLANGRVIEKTLYNRRTRQDEPALFVALTFERREVLDSSNIKPMNLIGVDRGENIPAVIALTDPEGCPLSRFKDSLGNPTHILRIGESYKEKQRTIQAKKEVEQRRAGGYSRKYASKAKNLADDMVRNTARDLLYYAVTQDAMLIFENLSRGFGRQGKRTFMAERQYTRMEDWLTAKLAYEGLPSKTYLSKTLAQYTSKTCSNCGFTITSADYDRMLEKLKKTATGWMTTINGKELKVEGQITYYNRYKRQNVVKDLSVELDRLSEESVNNDISSWTKGRSGEALSLLKKRFSHRPVQEKFVCLNCGFETHADEQAALNIARSWLFLRSQEYKKYQTNKTTGNTDKRAFVETWQSFYRKKLKEVWKPAV

SEQ ID NO: 49469 - protein, 978 aa, synthetic construct
  REGION 1..978: note = engineered CasX variant
QEIKRINKIRRRLVKDSNTKKAGKTGPMKTLLVRVMTPDLRERLENLRKKPENIPQPISNTSRANLNKLLTDYTEMKKAILHVYWEEFQKDPVGLMSRVAQPASKKIDQNKLKPEMDEKGNLTTAGFACSQCGQPLFVYKLEQVSEKGKAYTNYFGRCNVAEHEKLILLAQLKPEKDSDEAVTYSLGKFGQRALDFYSIHVTKESTHPVKPLAQIAGNRYASGPVGKALRDACMGTIASFLSKYQDIIIEHQKVVKGNQKRLESLRELAGKENLEYPSVTLPPQPHTKEGVDAYNEVIARVRMWVNLNLWQKLKLSRDDAKPLLRLKGFPSFPLVERQANEVDWWDMVCNVKKLINEKKEDGKVFWQNLAGYKRQEALRPYLSSEEDRKKGKKFARYQLGDLLLHLEKKHGEDWGDVYDEAWERIDKKVEGLSKHIKLEEERRSEDAQSKAALTDWLRAKASFVIEGLKEADKDEFCRCELKLQKWYGDLRGKPFAIEAENSILDISGFSKQYNCAFIWQKDGVKKLNLYLIINYFKGGKLRFKKIKPEAFEANRFYTVINKKSGEIVPMEVNFNFDDPNLIILPLAFGKRQGREFIWNDLLSLETGSLKLANGRVIEKTLYNRRTRQDEPALFVALTFERREVLDSSNIKPMNLIGVDRGENIPAVIALTDPEGCPLSRFKDSLGNPTHILRIGESYKEKQRTIQAKKEVEQRRAGGYSRKYASKAKNLADDMVRNTARDLLYYAVTQDAMLIFENLSRGFGRQGKRTFMAERQYTRMEDWLTAKLAYEGLPSKTYLSKTLAQYTSKTCSNCGFTITSADYDRMLEKLKKTATGWMTTINGKELKVEGQITYYNRYKRQNVVKDLSVELDRLSEESVNNDISSWTKGRSGEALSLLKKRFSHRPVQEKFVCLNCGFETHADEQAALNIARSWLFLRSQEYKKYQTNKTTGNTDKRAFVETWQSFYRKKLKEVWKPAV

SEQ ID NO: 49470 - protein, 978 aa, synthetic construct
  REGION 1..978: note = engineered CasX variant
QEIKRINKIRRRLVKDSNTKKAGKTGPMKTLLVRVMTPDLRERLENLRKKPENIPQPISNTSRANLNKLLTDYTEMKKAILHVYWEEFQKDPVGLMSRVAQPASKKIDQNKLKPEMDEKGNLTTAGFACSQCGQPLFVYKLEQVSEKGKAYTNYFGRCNVAEHEKLILLAQLKPEKDSDEAVTYSLGKFGQRALDFYSIHVTKESTHPVKPLAQIAGNRYASGPVGKALRDACMGTIASFLSKYQDIIIEHQKVVKGNQKRLESLRELAGKENLEYPSVTLPPQPHTKEGVDAYNEVIARVRMWVNLNLWQKLKLSRDDAKPLLRLKGFPSFPLVERQANEVDWWDMVCNVKKLINEKKEDGKVFWQNLAGYKRQEALRPYLSSEEDRKKGKKFARYQLGDLLLHLEKKHGEDWGKVYGEAWERIDKKVEGLSKHIKLEEERRSEDAQSKAALTDWLRAKASFVIEGLKEADKDEFCRCELKLQKWYGDLRGKPFAIEAENSILDISGFSKQYNCAFIWQKDGVKKLNLYLIINYFKGGKLRFKKIKPEAFEANRFYTVINKKSGEIVPMEVNFNFDDPNLIILPLAFGKRQGREFIWNDLLSLETGSLKLANGRVIEKTLYNRRTRQDEPALFVALTFERREVLDSSNIKPMNLIGVDRGENIPAVIALTDPEGCPLSRFKDSLGNPTHILRIGESYKEKQRTIQAKKEVEQRRAGGYSRKYASKAKNLADDMVRNTARDLLYYAVTQDAMLIFENLSRGFGRQGKRTFMAERQYTRMEDWLTAKLAYEGLPSKTYLSKTLAQYTSKTCSNCGFTITSADYDRMLEKLKKTATGWMTTINGKELKVEGQITYYNRYKRQNVVKDLSVELDRLSEESVNNDISSWTKGRSGEALSLLKKRFSHRPVQEKFVCLNCGFETHADEQAALNIARSWLFLRSQEYKKYQTNKTTGNTDKRAFVETWQSFYRKKLKEVWKPAV

SEQ ID NO: 49471 - protein, 978 aa, synthetic construct
  REGION 1..978: note = engineered CasX variant
QEIKRINKIRRRLVKDSNTKKAGKTGPMKTLLVRVMTPDLRERLENLRKKPENIPQPISNTSRANLNKLLTDYTEMKKAILHVYWEEFQKDPVGLMSRVAQPASKKIDQNKLKPEMDEKGNLTTAGFACSQCGQPLFVYKLEQVSEKGKAYTNYFGRCNVAEHEKLILLAQLKPEKDSDEAVTYSLGKFGQRALDFYSIHVTKESTHPVKPLAQIAGNRYASGPVGKALRDACMGTIASFLSKYQDIIIEHQKVVKGNQKRLESLRELAGKENLEYPSVTLPPQPHTKEGVDAYNEVIARVRMWVNLNLWQKLKLSRDDAKPLLRLKGFPSFPLVERQANEVDWWDMVCNVKKLINEKKEDGKVFWQNLAGYKRQEALRPYLSSEEDRKKGKKFARYQLGDLLLHLEKKHGEDWGKVYDEAWERIDKKVEGLSKHIKLEEERRSEDAQSKAALTDWLRAKASFVIEGKKEADKDEFCRCELKLQKWYGDLRGKPFAIEAENSILDISGFSKQYNCAFIWQKDGVKKLNLYLIINYFKGGKLRFKKIKPEAFEANRFYTVINKKSGEIVPMEVNFNFDDPNLIILPLAFGKRQGREFIWNDLLSLETGSLKLANGRVIEKTLYNRRTRQDEPALFVALTFERREVLDSSNIKPMNLIGVDRGENIPAVIALTDPEGCPLSRFKDSLGNPTHILRIGESYKEKQRTIQAKKEVEQRRAGGYSRKYASKAKNLADDMVRNTARDLLYYAVTQDAMLIFENLSRGFGRQGKRTFMAERQYTRMEDWLTAKLAYEGLPSKTYLSKTLAQYTSKTCSNCGFTITSADYDRMLEKLKKTATGWMTTINGKELKVEGQITYYNRYKRQNVVKDLSVELDRLSEESVNNDISSWTKGRSGEALSLLKKRFSHRPVQEKFVCLNCGFETHADEQAALNIARSWLFLRSQEYKKYQTNKTTGNTDKRAFVETWQSFYRKKLKEVWKPAV

SEQ ID NO: 49472 - protein, 978 aa, synthetic construct
  REGION 1..978: note = engineered CasX variant
QEIKRINKIRRRLVKDSNTKKAGKTGPMKTLLVRVMTPDLRERLENLRKKPENIPQPISNTSRANLNKLLTDYTEMKKAILHVYWEEFQKDPVGLMSRVAQPASKKIDQNKLKPEMDEKGNLTTAGFACSQCGQPLFVYKLEQVSEKGKAYTNYFGRCNVAEHEKLILLAQLKPEKDSDEAVTYSLGKFGQRALDFYSIHVTKESTHPVKPLAQIAGNRYASGPVGKALRDACMGTIASFLSKYQDIIIEHQKVVKGNQKRLESLRELAGKENLEYPSVTLPPQPHTKEGVDAYNEVIARVRMWVNLNLWQKLKLSRDDAKPLLRLKGFPSFPLVERQANEVDWWDMVCNVKKLINEKKEDGKVFWQNLAGYKRQEALRPYLSSEEDRKKGKKFARYQLGDLLLHLEKKHGEDWGKVYDEAWERIDKKVEGLSKHIKLEEERRSEDAQSKAALTDWLRAKASFVIEGSKEADKDEFCRCELKLQKWYGDLRGKPFAIEAENSILDISGFSKQYNCAFIWQKDGVKKLNLYLIINYFKGGKLRFKKIKPEAFEANRFYTVINKKSGEIVPMEVNFNFDDPNLIILPLAFGKRQGREFIWNDLLSLETGSLKLANGRVIEKTLYNRRTRQDEPALFVALTFERREVLDSSNIKPMNLIGVDRGENIPAVIALTDPEGCPLSRFKDSLGNPTHILRIGESYKEKQRTIQAKKEVEQRRAGGYSRKYASKAKNLADDMVRNTARDLLYYAVTQDAMLIFENLSRGFGRQGKRTFMAERQYTRMEDWLTAKLAYEGLPSKTYLSKTLAQYTSKTCSNCGFTITSADYDRMLEKLKKTATGWMTTINGKELKVEGQITYYNRYKRQNVVKDLSVELDRLSEESVNNDISSWTKGRSGEALSLLKKRFSHRPVQEKFVCLNCGFETHADEQAALNIARSWLFLRSQEYKKYQTNKTTGNTDKRAFVETWQSFYRKKLKEVWKPAV

SEQ ID NO: 49473 - protein, 979 aa, synthetic construct
  REGION 1..979: note = engineered CasX variant
QEIKRINKIRRRLVKDSNTKKAGKTGPMKTLLVRVMTPDLRERLENLRKKPENIPQPISNTSRANLNKLLTDYTEMKKAILHVYWEEFQKDPVGLMSRVAQPASKKIDQNKLKPEMDEKGNLTTAGFACSQCGQPLFVYKLEQVSEKGKAYTNYFGRCNVAEHEKLILLAQLKPEKDSDEAVTYSLGKFGQRALDFYSIHVTKESTHPVKPLAQIAGNRYASGPVGKALRDACMGTIASFLSKYQDIIIEHQKVVKGNQKRLESLRELAGKENLEYPSVTLPPQPHTKEGVDAYNEVIARVRMWVNLNLWQKLKLSRDDAKPLLRLKGFPSFPLVERQANEVDWWDMVCNVKKLINEKKEDGKVFWQNLAGYKRQEALRPYLSSEEDRKKGKKFARYQLGDLLLHLEKKHGEDWGKVYDEAWERIDKKVEGLSKHIKLEEERRSEDAQSKAALTDWLRAKASFVIEGLKEADDKDEFCRCELKLQKWYGDLRGKPFAIEAENSILDISGFSKQYNCAFIWQKDGVKKLNLYLIINYFKGGKLRFKKIKPEAFEANRFYTVINKKSGEIVPMEVNFNFDDPNLIILPLAFGKRQGREFIWNDLLSLETGSLKLANGRVIEKTLYNRRTRQDEPALFVALTFERREVLDSSNIKPMNLIGVDRGENIPAVIALTDPEGCPLSRFKDSLGNPTHILRIGESYKEKQRTIQAKKEVEQRRAGGYSRKYASKAKNLADDMVRNTARDLLYYAVTQDAMLIFENLSRGFGRQGKRTFMAERQYTRMEDWLTAKLAYEGLPSKTYLSKTLAQYTSKTCSNCGFTITSADYDRMLEKLKKTATGWMTTINGKELKVEGQITYYNRYKRQNVVKDLSVELDRLSEESVNNDISSWTKGRSGEALSLLKKRFSHRPVQEKFVCLNCGFETHADEQAALNIARSWLFLRSQEYKKYQTNKTTGNTDKRAFVETWQSFYRKKLKEVWKPAV

SEQ ID NO: 49474 - protein, 979 aa, synthetic construct
  REGION 1..979: note = engineered CasX variant
QEIKRINKIRRRLVKDSNTKKAGKTGPMKTLLVRVMTPDLRERLENLRKKPENIPQPISNTSRANLNKLLTDYTEMKKAILHVYWEEFQKDPVGLMSRVAQPASKKIDQNKLKPEMDEKGNLTTAGFACSQCGQPLFVYKLEQVSEKGKAYTNYFGRCNVAEHEKLILLAQLKPEKDSDEAVTYSLGKFGQRALDFYSIHVTKESTHPVKPLAQIAGNRYASGPVGKALRDACMGTIASFLSKYQDIIIEHQKVVKGNQKRLESLRELAGKENLEYPSVTLPPQPHTKEGVDAYNEVIARVRMWVNLNLWQKLKLSRDDAKPLLRLKGFPSFPLVERQANEVDWWDMVCNVKKLINEKKEDGKVFWQNLAGYKRQEALRPYLSSEEDRKKGKKFARYQLGDLLLHLEKKHGEDWGKVYDEAWERIDKKVEGLSKHIKLEEERRSEDAQSKAALTDWLRAKASFVIEGLKEADKDEFCRCELKLQKWYGDLRGKPFAIEAENSILDISGFSKQYNCAFIWQKDGVKKLNLYLIINYFKGGKLRFKKIKPEAFEANRFYTVINKKSGEIVPMEVNFNFDDPNLIILPLAFGKRQGREFIWNDLLSLETGSLKLANGRVIEKTLYNRRTRQDEPALFVALTFERREVLDSSNIKPMNLIGVDRGENIPAVIALTDPEGCPLSRFKDSLGNPTHILRIGESYKEKQRTIQAKKEVEQRRAGGYSRKYASKAKNLADDMVRNTARDLLYYAVTQDAMLIFENLSRGFGRQGKRTFMAERQYTRMEDWLTAKLAYEGLPSKTYLSKTLAQYTSKTCSNCGFTITSADYDRMLEKLKKTATGWMTTINGKELKVEGQITYYNRYKRQNVVKDLSVELDRLSEESVNNDISSWTKGRSGNEALSLLKKRFSHRPVQEKFVCLNCGFETHADEQAALNIARSWLFLRSQEYKKYQTNKTTGNTDKRAFVETWQSFYRKKLKEVWKPAV

SEQ ID NO: 49475 - protein, 978 aa, synthetic construct
  REGION 1..978: note = engineered CasX variant
QEIKRINKIRRRLVKDSNTKKAGKTGPMKTLLVRVMTPDLRERLENLRKKPENIPQPISNTSRANLNKLLTDYTEMKKAILHVYWEEFQKDPVGLMSRVAQPASKKIDQNKLKPEMDEKGNLTTAGFACSQCGQPLFVYKLEQVSEKGKAYTNYFGRCNVAEHEKLILLAQLKPEKDSDEAVTYSLGKFGQRALDFYSIHVTKESTHPVKPLAQIAGNRYASGPVGKALRDACMGTIASFLSKYQDIIIEHQKVVKGNQKRLESLRELAGKENLEYPSVTLPPQPHTKEGVDAYNEVIARVRMWVNLNLWQKLKLSRDDAKPLLRLKGFPSFPLVERQANEVDWWDMVCNVKKLINEKKEDGKVFWQNLAGYKRQEALRPYLSSEEDRQKGKKFARYQLGDLLLHLEKKHGEDWGKVYDEAWERIDKKVEGLSKHIKLEEERRSEDAQSKAALTDWLRAKASFVIEGLKEADKDEFCRCELKLQKWYGDLRGKPFAIEAENSILDISGFSKQYNCAFIWQKDGVKKLNLYLIINYFKGGKLRFKKIKPEAFEANRFYTVINKKSGEIVPMEVNFNFDDPNLIILPLAFGKRQGREFIWNDLLSLETGSLKLANGRVIEKTLYNRRTRQDEPALFVALTFERREVLDSSNIKPMNLIGVDRGENIPAVIALTDPEGCPLSRFKDSLGNPTHILRIGESYKEKQRTIQAKKEVEQRRAGGYSRKYASKAKNLADDMVRNTARDLLYYAVTQDAMLIFENLSRGFGRQGKRTFMAERQYTRMEDWLTAKLAYEGLPSKTYLSKTLAQYTSKTCSNCGFTITSADYDRMLEKLKKTATGWMTTINGKELKVEGQITYYNRYKRQNVVKDLSVELDRLSEESVNNDISSWTKGRSGEALSLLKKRFSHRPVQEKFVCLNCGFETHADEQAALNIARSWLFLRSQEYKKYQTNKTTGNTDKRAFVETWQSFYRKKLKEVWKPAV

SEQ ID NO: 49476 - protein, 978 aa, synthetic construct
  REGION 1..978: note = engineered CasX variant
QEIKRINKIRRRLVKDSNTKKAGKTGPMKTLLVRVMTPDLRERLENLRKKPENIPQPISNTSRANLNKLLTDYTEMKKAILHVYWEEFQKDPVGLMSRVAQPASKKIDQNKLKPEMDEKGNLTTAGFACSQCGQPLFVYKLEQVSEKGKAYTNYFGRCNVAEHEKLILLAQLKPEKDSDEAVTYSLGKFGQRALDFYSIHVTKESTHPVKPLAQIAGNRYASGPVGKALRDACMGTIASFLSKYQDIIIEHQKVVKGNQKRLESLRELAGKENLEYPSVTLPPQPHTKEGVDAYNEVIARVRMWVNLNLWQKLKLSRDDAKPLLRLKGFPSFPLVERQANEVDWWDMVCNVKKLINEKKEDGKVFWQNLAGYKRQEALRPYLSSEEDRKKGKKFARYQLGDLLLHLEKKHGEDWGKVYDEAWERIDKKVEGLSKHIKLEEERRSEDAQSKAALTDWLRAKASFVIEGLKEADKDEFCRCELKLQKWYGDLRGKPFAIEAENSILDISGFSKQYNCAFIWQKDGVKKLNLYLIINYFKGGKLRFKKIKPEAFEANRFYTVINKKSGEIVPMEVNFNFDDPNLIILPLAFGKRQGREFIWNDLLSLETGSLKLANGRVIEKTLYNRRTRQDEPALFVALTFERREVLDSSNIKPMNLIGVDRGENIPAVIALTDPEGCPLSRFKDSLGNPTHILRIGESYKEKQRTIQAKKEVEQRRAGGYSRKYASKAKNLADDMVRNTARDLLYYAVTQDAMLIFENLSRGFGRQGKRTFMAERQYTRMEDWLTAKLAYEGLPSQTYLSKTLAQYTSKTCSNCGFTITSADYDRMLEKLKKTATGWMTTINGKELKVEGQITYYNRYKRQNVVKDLSVELDRLSEESVNNDISSWTKGRSGEALSLLKKRFSHRPVQEKFVCLNCGFETHADEQAALNIARSWLFLRSQEYKKYQTNKTTGNTDKRAFVETWQSFYRKKLKEVWKPAV

SEQ ID NO: 49477 - protein, 978 aa, synthetic construct
  REGION 1..978: note = engineered CasX variant
QEIKRINKIRRRLVKDSNTKKAGKTGPMKTLLVRVMTPDLRERLENLRKKPENIPQPISNTSRANLNKLLTDYTEMKKAILHVYWEEFQKDPVGLMSRVAQPASKKIDQNKLKPEMDEKGNLTTAGFACSQCGQPLFVYKLEQVSEKGKAYTNYFGRCNVAEHEKLILLAQLKPEKDSDEAVTYSLGKFGQRALDFYSIHVTKESTHPVKPLAQIAGNRYASGPVGKALRDACMGTIASFLSKYQDIIIEHQKVVKGNQKRLESLRELAGKENLEYPSVTLPPQPHTKEGVDAYNEVIARVRMWVNLNLWQKLKLSRDDAKPLLRLKGFPSFPLVERQANEVDWWDMVCNVKKLINEKKEDGKVFWQNLAGYKRQEALRPYLSSEEDRKKGKKFARYQLGDLLLHLEKKHGEDWGKVYDEAWERIDKKVEGLSKHIKLEEERRSEDAQSKAALTDWLRAKASFVIEGLKEADKDEFCRCELKLQKWYGDLRGKPFAIEAENSILDISGFSKQYNCAFIWQKDGVKKLNLYLIINYFKGGKLRFKKIKPEAFEANRFYTVINKKSGEIVPMEVNFNFDDPNLIILPLAFGKRQGREFIWNDLLSLETGSLKLANGRVIEKTLYNRRTRQDEPALFVALTFERREVLDSSNIKPMNLIGVDRGENIPAVIALTDPEGCPLSRFKDSLGNPTHILRIGESYKEKQRTIQAKKEVEQRRAGGYSRKYASKAKNLADDMVRNTARDLLYYAVTQDAMLIFENLSRGFGRQGKRTFMAERQYTRMEDWLTAKLAYNGLPSKTYLSKTLAQYTSKTCSNCGFTITSADYDRMLEKLKKTATGWMTTINGKELKVEGQITYYNRYKRQNVVKDLSVELDRLSEESVNNDISSWTKGRSGEALSLLKKRFSHRPVQEKFVCLNCGFETHADEQAALNIARSWLFLRSQEYKKYQTNKTTGNTDKRAFVETWQSFYRKKLKEVWKPAV

SEQ ID NO: 49478 - protein, 978 aa, synthetic construct
  REGION 1..978: note = engineered CasX variant
QEIKRINKIRRRLVKDSNTKKAGKTGPMKTLLVRVMTPDLRERLENLRKKPENIPQPISNTSRANLNKLLTDYTEMKKAILHVYWEEFQKDPVGLMSRVAQPASKKIDQNKLKPEMDEKGNLTTAGFACSQCGQPLFVYKLEQVSEKGKAYTNYFGRCNVAEHEKLIQLAQLKPEKDSDEAVTYSLGKFGQRALDFYSIHVTKESTHPVKPLAQIAGNRYASGPVGKALRDACMGTIASFLSKYQDIIIEHQKVVKGNQKRLESLRELAGKENLEYPSVTLPPQPHTKEGVDAYNEVIARVRMWVNLNLWQKLKLSRDDAKPLLRLKGFPSFPLVERQANEVDWWDMVCNVKKLINEKKEDGKVFWQNLAGYKRQEALRPYLSSEEDRKKGKKFARYQLGDLLLHLEKKHGEDWGKVYDEAWERIDKKVEGLSKHIKLEEERRSEDAQSKAALTDWLRAKASFVIEGLKEADKDEFCRCELKLQKWYGDLRGKPFAIEAENSILDISGFSKQYNCAFIWQKDGVKKLNLYLIINYFKGGKLRFKKIKPEAFEANRFYTVINKKSGEIVPMEVNFNFDDPNLIILPLAFGKRQGREFIWNDLLSLETGSLKLANGRVIEKTLYNRRTRQDEPALFVALTFERREVLDSSNIKPMNLIGVDRGENIPAVIALTDPEGCPLSRFKDSLGNPTHILRIGESYKEKQRTIQAKKEVEQRRAGGYSRKYASKAKNLADDMVRNTARDLLYYAVTQDAMLIFENLSRGFGRQGKRTFMAERQYTRMEDWLTAKLAYEGLPSKTYLSKTLAQYTSKTCSNCGFTITSADYDRMLEKLKKTATGWMTTINGKELKVEGQITYYNRYKRQNVVKDLSVELDRLSEESVNNDISSWTKGRSGEALSLLKKRFSHRPVQEKFVCLNCGFETHADEQAALNIARSWLFLRSQEYKKYQTNKTTGNTDKRAFVETWQSFYRKKLKEVWKPAV

SEQ ID NO: 49479 - protein, 978 aa, synthetic construct
  REGION 1..978: note = engineered CasX variant
QEIKRINKIRRRLVKDSNTKKAGKTGPMKTLLVRVMTPDLRERLENLRKKPENIPQPISNTSRANLNKLLTDYTEMKKAILHVYWEEFQKDPVGLMSRVAQPASKKIDQNKLKPEMDEKGNLTTAGFACSQCGQPLFVYKLEQVSEKGKAYTNYFGRCNVAEHEKLILLAQLKPEKDSDEAVTYSLGKFGQRALDFYSIHVTKESTHPVKPLAQIAGNRYASGPVGKALRDACMGTIASFLSKYQDIIIEHQKVVKGNQKRLESLRELAGKENLEYPSVTLPPQPHTKEGVDAYNEVIARVRMWVNLNLWQKLKLSRDDAKPLLRLKGFPSFPLVERQANEVDWWDMVCNVKKLINEKKEDGKVFWQNLAIYKRQEALRPYLSSEEDRKKGKKFARYQLGDLLLHLEKKHGEDWGKVYDEAWERIDKKVEGLSKHIKLEEERRSEDAQSKAALTDWLRAKASFVIEGLKEADKDEFCRCELKLQKWYGDLRGKPFAIEAENSILDISGFSKQYNCAFIWQKDGVKKLNLYLIINYFKGGKLRFKKIKPEAFEANRFYTVINKKSGEIVPMEVNFNFDDPNLIILPLAFGKRQGREFIWNDLLSLETGSLKLANGRVIEKTLYNRRTRQDEPALFVALTFERREVLDSSNIKPMNLIGVDRGENIPAVIALTDPEGCPLSRFKDSLGNPTHILRIGESYKEKQRTIQAKKEVEQRRAGGYSRKYASKAKNLADDMVRNTARDLLYYAVTQDAMLIFENLSRGFGRQGKRTFMAERQYTRMEDWLTAKLAYEGLPSKTYLSKTLAQYTSKTCSNCGFTITSADYDRMLEKLKKTATGWMTTINGKELKVEGQITYYNRYKRQNVVKDLSVELDRLSEESVNNDISSWTKGRSGEALSLLKKRFSHRPVQEKFVCLNCGFETHADEQAALNIARSWLFLRSQEYKKYQTNKTTGNTDKRAFVETWQSFYRKKLKEVWKPAV

SEQ ID NO: 49480 - protein, 978 aa, synthetic construct
  REGION 1..978: note = engineered CasX variant
QEIKRINKIRRRLVKDSNTKKAGKTGPMKTLLVRVMTPDLRERLENLRKKPENIPQPISNTSRANLNKLLTDYTEMKKAILHVYWEEFQKDPVGLMSRVAQPASKKIDQNKLKPEMDEKGNLTTAGFACSQCGQPLFVYKLEQVSEKGKAYTNYFGRCNVAEHEKLILLAQLKPEKDSDEAVTYSLGKFGQRALDFYSIHVTKESTHPVKPLAQIAGNRYASGPVGKALRDACMGTIASFLSKYQDIIIEHQKVVKGNQKRLESLRELAGKENLEYPSVTLPPQPHTKEGVDAYNEVIARVRMWVNLNLWQKLKLSRDDAKPLLRLKGFPSFPLVERQANEVDWWDMVCNVKKLINEKKEDGKVFWQNLAGYKRQEALRPYLSSEEDREKGKKFARYQLGDLLLHLEKKHGEDWGKVYDEAWERIDKKVEGLSKHIKLEEERRSEDAQSKAALTDWLRAKASFVIEGLKEADKDEFCRCELKLQKWYGDLRGKPFAIEAENSILDISGFSKQYNCAFIWQKDGVKKLNLYLIINYFKGGKLRFKKIKPEAFEANRFYTVINKKSGEIVPMEVNFNFDDPNLIILPLAFGKRQGREFIWNDLLSLETGSLKLANGRVIEKTLYNRRTRQDEPALFVALTFERREVLDSSNIKPMNLIGVDRGENIPAVIALTDPEGCPLSRFKDSLGNPTHILRIGESYKEKQRTIQAKKEVEQRRAGGYSRKYASKAKNLADDMVRNTARDLLYYAVTQDAMLIFENLSRGFGRQGKRTFMAERQYTRMEDWLTAKLAYEGLPSKTYLSKTLAQYTSKTCSNCGFTITSADYDRMLEKLKKTATGWMTTINGKELKVEGQITYYNRYKRQNVVKDLSVELDRLSEESVNNDISSWTKGRSGEALSLLKKRFSHRPVQEKFVCLNCGFETHADEQAALNIARSWLFLRSQEYKKYQTNKTTGNTDKRAFVETWQSFYRKKLKEVWKPAV

SEQ ID NO: 49481 - protein, 978 aa, synthetic construct
  REGION 1..978: note = engineered CasX variant
QEIKRINKIRRRLVKDSNTKKAGKTGPMKTLLVRVMTPDLRERLENLRKKPENIPQPISNTSRANLNKLLTDYTEMKKAILHVYWEEFQKDPVGLMSRVAQPASKKIDQNKLKPEMDEKGNLTTAGFACSQCGQPLFVYKLEQVSEKGKAYTNYFGRCNVAEHEKLILLAQLKPEKDSDEAVTYSLGKFGQRALDFYSIHVTKESTHPVKPLAQIAGNRYASGPVGKALRDACMGTIASFLSKYQDIIIEHQKVVKGNQKRLESLRELAGKENLEYPSVTLPPQPHTKEGVDAYNEVIARVRMWVNLNLWQKLKLSRDDAKPLLRLKGFPSFPLVERQANEVDWWDMVCNVKKLINEKKEDGKVFWQNLAGYKRQEALRPYLSSEEDRKKGKKFARYQLGDLLLHLEKKHGEDWGKVYDEAWERIDKKVEGLSKHIKLEEERRSEDAQSKAALTDWLRAKASFVIEGLKEADKDEFCRCELKLQKWYGDLRGKPFAIEAENSILDISGFSKQYNCAFIWQKDGVKKLNLYLIINYFKGGKLRFKKIKPEAFEANRFYTVINKKSGEIVIMEVNFNFDDPNLIILPLAFGKRQGREFIWNDLLSLETGSLKLANGRVIEKTLYNRRTRQDEPALFVALTFERREVLDSSNIKPMNLIGVDRGENIPAVIALTDPEGCPLSRFKDSLGNPTHILRIGESYKEKQRTIQAKKEVEQRRAGGYSRKYASKAKNLADDMVRNTARDLLYYAVTQDAMLIFENLSRGFGRQGKRTFMAERQYTRMEDWLTAKLAYEGLPSKTYLSKTLAQYTSKTCSNCGFTITSADYDRMLEKLKKTATGWMTTINGKELKVEGQITYYNRYKRQNVVKDLSVELDRLSEESVNNDISSWTKGRSGEALSLLKKRFSHRPVQEKFVCLNCGFETHADEQAALNIARSWLFLRSQEYKKYQTNKTTGNTDKRAFVETWQSFYRKKLKEVWKPAV

SEQ ID NO: 49482 - protein, 978 aa, synthetic construct
  REGION 1..978: note = engineered CasX variant
QEIKRINKIRRRLVKDSNTKKAGKTGPMKTLLVRVMTPDLRERLENLRKKPENIPQPISNTSRANLNKLLTDYTEMKKAILHVYWEEFQKDPVGLMSRVAQPASKKIDQNKLKPEMDEKGNLTTAGFACSQCGQPLFVYKLEQVSEKGKAYTNYFGRCNVAEHEKLILLAQLKPEKDSDEAVTYSLGKFGQRALDFYSIHVTKESTHPVKPLAQIAGNRYASGPVGKALRGACMGTIASFLSKYQDIIIEHQKVVKGNQKRLESLRELAGKENLEYPSVTLPPQPHTKEGVDAYNEVIARVRMWVNLNLWQKLKLSRDDAKPLLRLKGFPSFPLVERQANEVDWWDMVCNVKKLINEKKEDGKVFWQNLAGYKRQEALRPYLSSEEDRKKGKKFARYQLGDLLLHLEKKHGEDWGKVYDEAWERIDKKVEGLSKHIKLEEERRSEDAQSKAALTDWLRAKASFVIEGLKEADKDEFCRCELKLQKWYGDLRGKPFAIEAENSILDISGFSKQYNCAFIWQKDGVKKLNLYLIINYFKGGKLRFKKIKPEAFEANRFYTVINKKSGEIVPMEVNFNFDDPNLIILPLAFGKRQGREFIWNDLLSLETGSLKLANGRVIEKTLYNRRTRQDEPALFVALTFERREVLDSSNIKPMNLIGVDRGENIPAVIALTDPEGCPLSRFKDSLGNPTHILRIGESYKEKQRTIQAKKEVEQRRAGGYSRKYASKAKNLADDMVRNTARDLLYYAVTQDAMLIFENLSRGFGRQGKRTFMAERQYTRMEDWLTAKLAYEGLPSKTYLSKTLAQYTSKTCSNCGFTITSADYDRVLEKLKKTATGWMTTINGKELKVEGQITYYNRYKRQNVVKDLSVELDRLSEESVNNDISSWTKGRQGEALSLLKKRFSHRPVQEKFVCLNCGFETHADEQAALNIARSWLFLRSQEYKKYQTNKTTGNTDKRAFVETWQSFYRKKLKEVWKPAV

SEQ ID NO: 49483 - protein, 978 aa, synthetic construct
  REGION 1..978: note = engineered CasX variant
QEIKRINKIRRRLVKDSNTKKAGKTGPMKTLLVRVMTPDLRERLENLRKKPENIPQPISNTSRANLNKLLTDYTEMKKAILHVYWEEFQKDPVGLMSRVAQPASKKIDQNKLKPEMDEKGNLTTAGFACSQCGQPLFVYKLEQVSEKGKAYTNYFGRCNVAEHEKLILLAQLKPEKDSDEAVTYSLGKFGQRALDFYSIHVTKESTHPVKPLAQIAGNRYASGPVGKALRDACMGTIASFLSKYQDIIIEHQKVVKGNQKRLESLRELAGKENLEYPSVTLPPQPHTKEGVDAYNEVIARVRMWVNLNLWQKLKLSRDDAKPLLRLKNFPSFPLVERQANEVDWWDMVCNVKKLINEKKEDGKVFWQNLAGYKRQEALRPYLSSEEDRKKGKKFARYQLGDLLLHLEKKHGEDWGKVYDEAWERIDKKVEGLSKHIKLEEERRSEDAQSKAALTDWLRAKASFVIEGLKEADKDEFCRCELKLQKWYGDLRGKPFAIEAENSILDISGFSKQYNCAFIWQKDGVKKLNLYLIINYFKGGKLRFKKIKPEAFEANRFYTVINKKSGEIVPMEVNFNFDDPNLIILPLAFGKRQGREFIWNDLLSLETGSLKLANGRVIEKTLYNRRTRQDEPALFVALTFERREVLDSSNIKPMNLIGVDRGENIPAVIALTDPEGCPLSRFKDSLGNPTHILRIGESYKEKQRTIQAKKEVEQRRAGGYSRKYASKAKNLADDMVRNTARDLLYYAVTQDAMLIFENLSRGFGRQGKRTFMAERQYTRMEDWLTAKLAYEGLPSKTYLSKTLAQYTSKTCSNCGFTITSADYDRVLEKLKKTATGWMTTINGKELKVEGQITYYNRYKRQNVVKDLSVELDRLSEESVNNDISSWTKGRQGEALSLLKKRFSHRPVQEKFVCLNCGFETHADEQAALNIARSWLFLRSQEYKKYQTNKTTGNTDKRAFVETWQSFYRKKLKEVWKPAV

SEQ ID NO: 49484 - protein, 978 aa, synthetic construct
  REGION 1..978: note = engineered CasX variant
QEIKRINKIRRRLVKDSNTKKAGKTGPMKTLLVRVMTPDLRERLENLRKKPENIPQPISNTSRANLNKLLTDYTEMKKAILHVYWEEFQKDPVGLMSRVAQPASKKIDQNKLKPEMDEKGNLTTAGFACSQCGQPLFVYKLEQVSEKGKAYTNYFGRCNVAEHEKLILLAQLKPEKDSDEAVTYSLGKFGQRALDFYSIHVTKESTHPVKPLAQIAGNRYASGPVGKALRDACMGTIASFLSKYQDIIIEHQKVVKGNQKRLESLRELAGKENLEYPSVTLPPQPHTKEGVDAYNEVIARVRMWVNLNLWQKLKLSRDDAKPLLRLKGFPSFPLVERQANEVDWWDMVCNVKKLINEKKEDGKVFWQNLAGYKRQEALRPYLSSEEDRKKGKKFARYQLGDLLNHLEKKHGEDWGKVYDEAWERIDKKVEGLSKHIKLEEERRSEDAQSKAALTDWLRAKASFVIEGLKEADKDEFCRCELKLQKWYGDLRGKPFAIEAENSILDISGFSKQYNCAFIWQKDGVKKLNLYLIINYFKGGKLRFKKIKPEAFEANRFYTVINKKSGEIVPMEVNFNFDDPNLIILPLAFGKRQGREFIWNDLLSLETGSLKLANGRVIEKTLYNRRTRQDEPALFVALTFERREVLDSSNIKPMNLIGVDRGENIPAVIALTDPEGCPLSRFKDSLGNPTHILRIGESYKEKQRTIQAKKEVEQRRAGGYSRKYASKAKNLADDMVRNTARDLLYYAVTQDAMLIFENLSRGFGRQGKRTFMAERQYTRMEDWLTAKLAYEGLPSKTYLSKTLAQYTSKTCSNCGFTITSADYDRVLEKLKKTATGWMTTINGKELKVEGQITYYNRYKRQNVVKDLSVELDRLSEESVNNDISSWTKGRQGEALSLLKKRFSHRPVQEKFVCLNCGFETHADEQAALNIARSWLFLRSQEYKKYQTNKTTGNTDKRAFVETWQSFYRKKLKEVWKPAV

SEQ ID NO: 49485 - protein, 978 aa, synthetic construct
  REGION 1..978: note = engineered CasX variant
QEIKRINKIRRRLVKDSNTKKAGKTGPMKTLLVRVMTPDLRERLENLRKKPENIPQPISNTSRANLNKLLTDYTEMKKAILHVYWEEFQKDPVGLMSRVAQPASKKIDQNKLKPEMDEKGNLTTAGFACSQCGQPLFVYKLEQVSEKGKAYTNYFGRCNVAEHEKLILLAQLKPEKDSDEAVTYSLGKFGQRALDFYSIHVTKESTHPVKPLAQIAGNRYASGPVGKALRDACMGTIASFLSKYQDIIIEHQKVVKGNQKRLESLRELAGKENLEYPSVTLPPQPHTKEGVDAYNEVIARVRMWVNLNLWQKLKLSRDDAKPLLRLKGFPSFPLVERQANEVDWWDMVCNVKKLINEKKEDGKVFWQNLAGYKRQEALRPYLSSEEDRKKGKKFARYQLGDLLWHLEKKHGEDWGKVYDEAWERIDKKVEGLSKHIKLEEERRSEDAQSKAALTDWLRAKASFVIEGLKEADKDEFCRCELKLQKWYGDLRGKPFAIEAENSILDISGFSKQYNCAFIWQKDGVKKLNLYLIINYFKGGKLRFKKIKPEAFEANRFYTVINKKSGEIVPMEVNFNFDDPNLIILPLAFGKRQGREFIWNDLLSLETGSLKLANGRVIEKTLYNRRTRQDEPALFVALTFERREVLDSSNIKPMNLIGVDRGENIPAVIALTDPEGCPLSRFKDSLGNPTHILRIGESYKEKQRTIQAKKEVEQRRAGGYSRKYASKAKNLADDMVRNTARDLLYYAVTQDAMLIFENLSRGFGRQGKRTFMAERQYTRMEDWLTAKLAYEGLPSKTYLSKTLAQYTSKTCSNCGFTITSADYDRVLEKLKKTATGWMTTINGKELKVEGQITYYNRYKRQNVVKDLSVELDRLSEESVNNDISSWTKGRQGEALSLLKKRFSHRPVQEKFVCLNCGFETHADEQAALNIARSWLFLRSQEYKKYQTNKTTGNTDKRAFVETWQSFYRKKLKEVWKPAV

SEQ ID NO: 49486 - protein, 978 aa, synthetic construct
  REGION 1..978: note = engineered CasX variant
QEIKRINKIRRRLVKDSNTKKAGKTGPMKTLLVRVMTPDLRERLENLRKKPENIPQPISNTSRANLNKLLTDYTEMKKAILHVYWEEFQKDPVGLMSRVAQPASKKIDQNKLKPEMDEKGNLTTAGFACSQCGQPLFVYKLEQVSEKGKAYTNYFGRCNVAEHEKLILLAQLKPEKDSDEAVTYSLGKFGQRALDFYSIHVTKESTHPVKPLAQIAGNRYASGPVGKALRDACMGTIASFLSKYQDIIIEHQKVVKGNQKRLESLRELAGKENLEYPSVTLPPQPHTKEGVDAYNEVIARVRMWVNLNLWQKLKLSRDDAKPLLRLKGFPSFPLVERQANEVDWWDMVCNVKKLINEKKEDGKVFWQNLAGYKRQEALRPYLSSEEDRKKGKKFARYQLGDLLLHLYKKHGEDWGKVYDEAWERIDKKVEGLSKHIKLEEERRSEDAQSKAALTDWLRAKASFVIEGLKEADKDEFCRCELKLQKWYGDLRGKPFAIEAENSILDISGFSKQYNCAFIWQKDGVKKLNLYLIINYFKGGKLRFKKIKPEAFEANRFYTVINKKSGEIVPMEVNFNFDDPNLIILPLAFGKRQGREFIWNDLLSLETGSLKLANGRVIEKTLYNRRTRQDEPALFVALTFERREVLDSSNIKPMNLIGVDRGENIPAVIALTDPEGCPLSRFKDSLGNPTHILRIGESYKEKQRTIQAKKEVEQRRAGGYSRKYASKAKNLADDMVRNTARDLLYYAVTQDAMLIFENLSRGFGRQGKRTFMAERQYTRMEDWLTAKLAYEGLPSKTYLSKTLAQYTSKTCSNCGFTITSADYDRVLEKLKKTATGWMTTINGKELKVEGQITYYNRYKRQNVVKDLSVELDRLSEESVNNDISSWTKGRQGEALSLLKKRFSHRPVQEKFVCLNCGFETHADEQAALNIARSWLFLRSQEYKKYQTNKTTGNTDKRAFVETWQSFYRKKLKEVWKPAV

SEQ ID NO: 49487 - protein, 978 aa, synthetic construct
  REGION 1..978: note = engineered CasX variant
QEIKRINKIRRRLVKDSNTKKAGKTGPMKTLLVRVMTPDLRERLENLRKKPENIPQPISNTSRANLNKLLTDYTEMKKAILHVYWEEFQKDPVGLMSRVAQPASKKIDQNKLKPEMDEKGNLTTAGFACSQCGQPLFVYKLEQVSEKGKAYTNYFGRCNVAEHEKLILLAQLKPEKDSDEAVTYSLGKFGQRALDFYSIHVTKESTHPVKPLAQIAGNRYASGPVGKALRDACMGTIASFLSKYQDIIIEHQKVVKGNQKRLESLRELAGKENLEYPSVTLPPQPHTKEGVDAYNEVIARVRMWVNLNLWQKLKLSRDDAKPLLRLKGFPSFPLVERQANEVDWWDMVCNVKKLINEKKEDGKVFWQNLAGYKRQEALRPYLSSEEDRKKGKKFARYQLGDLLLHLEKKHPEDWGKVYDEAWERIDKKVEGLSKHIKLEEERRSEDAQSKAALTDWLRAKASFVIEGLKEADKDEFCRCELKLQKWYGDLRGKPFAIEAENSILDISGFSKQYNCAFIWQKDGVKKLNLYLIINYFKGGKLRFKKIKPEAFEANRFYTVINKKSGEIVPMEVNFNFDDPNLIILPLAFGKRQGREFIWNDLLSLETGSLKLANGRVIEKTLYNRRTRQDEPALFVALTFERREVLDSSNIKPMNLIGVDRGENIPAVIALTDPEGCPLSRFKDSLGNPTHILRIGESYKEKQRTIQAKKEVEQRRAGGYSRKYASKAKNLADDMVRNTARDLLYYAVTQDAMLIFENLSRGFGRQGKRTFMAERQYTRMEDWLTAKLAYEGLPSKTYLSKTLAQYTSKTCSNCGFTITSADYDRVLEKLKKTATGWMTTINGKELKVEGQITYYNRYKRQNVVKDLSVELDRLSEESVNNDISSWTKGRQGEALSLLKKRFSHRPVQEKFVCLNCGFETHADEQAALNIARSWLFLRSQEYKKYQTNKTTGNTDKRAFVETWQSFYRKKLKEVWKPAV

SEQ ID NO: 49488 - protein, 979 aa, synthetic construct
  REGION 1..979: note = engineered CasX variant
QEIKRINKIRRRLVKDSNTKKAGKTGPMKTLLVRVMTPDLRERLENLRKKPENIPQPISNTSRANLNKLLTDYTEMKKAILHVYWEEFQKDPVGLMSRVAQPASKKIDQNKLKPEMDEKGNLTTAGFACSQCGQPLFVYKLEQVSEKGKAYTNYFGRCNVAEHEKLILLAQLKPEKDSDEAVTYSLGKFGQRALDFYSIHVTKESTHPVKPLAQIAGNRYASGPVGKALRDACMGTIASFLSKYQDIIIEHQKVVKGNQKRLESLRELAGKENLEYPSVTLPPQPHTKEGVDAYNEVIARVRMWVNLNLWQKLKLSRDDAKPLLRLKGFPSFPLVERQANEVDWWDMVCNVKKLINEKKEDGKVFWQNLAGYKRQEALRPYLSSEEDRKKGKKFARYQLGDLLLHLEKKHGERDWGKVYDEAWERIDKKVEGLSKHIKLEEERRSEDAQSKAALTDWLRAKASFVIEGLKEADKDEFCRCELKLQKWYGDLRGKPFAIEAENSILDISGFSKQYNCAFIWQKDGVKKLNLYLIINYFKGGKLRFKKIKPEAFEANRFYTVINKKSGEIVPMEVNFNFDDPNLIILPLAFGKRQGREFIWNDLLSLETGSLKLANGRVIEKTLYNRRTRQDEPALFVALTFERREVLDSSNIKPMNLIGVDRGENIPAVIALTDPEGCPLSRFKDSLGNPTHILRIGESYKEKQRTIQAKKEVEQRRAGGYSRKYASKAKNLADDMVRNTARDLLYYAVTQDAMLIFENLSRGFGRQGKRTFMAERQYTRMEDWLTAKLAYEGLPSKTYLSKTLAQYTSKTCSNCGFTITSADYDRVLEKLKKTATGWMTTINGKELKVEGQITYYNRYKRQNVVKDLSVELDRLSEESVNNDISSWTKGRQGEALSLLKKRFSHRPVQEKFVCLNCGFETHADEQAALNIARSWLFLRSQEYKKYQTNKTTGNTDKRAFVETWQSFYRKKLKEVWKPAV

SEQ ID NO: 49489 - protein, 979 aa, synthetic construct
  REGION 1..979: note = engineered CasX variant
QEIKRINKIRRRLVKDSNTKKAGKTGPMKTLLVRVMTPDLRERLENLRKKPENIPQPISNTSRANLNKLLTDYTEMKKAILHVYWEEFQKDPVGLMSRVAQPASKKIDQNKLKPEMDEKGNLTTAGFACSQCGQPLFVYKLEQVSEKGKAYTNYFGRCNVAEHEKLILLAQLKPEKDSDEAVTYSLGKFGQRALDFYSIHVTKESTHPVKPLAQIAGNRYASGPVGKALRDACMGTIASFLSKYQDIIIEHQKVVKGNQKRLESLRELAGKENLEYPSVTLPPQPHTKEGVDAYNEVIARVRMWVNLNLWQKLKLSRDDAKPLLRLKGFPSFPLVERQANEVDWWDMVCNVKKLINEKKEDGKVFWQNLAGYKRQEALRPYLSSEEDRKKGKKFARYQLGDLLLHLEKKHGEYDWGKVYDEAWERIDKKVEGLSKHIKLEEERRSEDAQSKAALTDWLRAKASFVIEGLKEADKDEFCRCELKLQKWYGDLRGKPFAIEAENSILDISGFSKQYNCAFIWQKDGVKKLNLYLIINYFKGGKLRFKKIKPEAFEANRFYTVINKKSGEIVPMEVNFNFDDPNLIILPLAFGKRQGREFIWNDLLSLETGSLKLANGRVIEKTLYNRRTRQDEPALFVALTFERREVLDSSNIKPMNLIGVDRGENIPAVIALTDPEGCPLSRFKDSLGNPTHILRIGESYKEKQRTIQAKKEVEQRRAGGYSRKYASKAKNLADDMVRNTARDLLYYAVTQDAMLIFENLSRGFGRQGKRTFMAERQYTRMEDWLTAKLAYEGLPSKTYLSKTLAQYTSKTCSNCGFTITSADYDRVLEKLKKTATGWMTTINGKELKVEGQITYYNRYKRQNVVKDLSVELDRLSEESVNNDISSWTKGRQGEALSLLKKRFSHRPVQEKFVCLNCGFETHADEQAALNIARSWLFLRSQEYKKYQTNKTTGNTDKRAFVETWQSFYRKKLKEVWKPAV

SEQ ID NO: 49490 - protein, 978 aa, synthetic construct
  REGION 1..978: note = engineered CasX variant
QEIKRINKIRRRLVKDSNTKKAGKTGPMKTLLVRVMTPDLRERLENLRKKPENIPQPISNTSRANLNKLLTDYTEMKKAILHVYWEEFQKDPVGLMSRVAQPASKKIDQNKLKPEMDEKGNLTTAGFACSQCGQPLFVYKLEQVSEKGKAYTNYFGRCNVAEHEKLILLAQLKPEKDSDEAVTYSLGKFGQRALDFYSIHVTKESTHPVKPLAQIAGNRYASGPVGKALRDACMGTIASFLSKYQDIIIEHQKVVKGNQKRLESLRELAGKENLEYPSVTLPPQPHTKEGVDAYNEVIARVRMWVNLNLWQKLKLSRDDAKPLLRLKGFPSFPLVERQANEVDWWDMVCNVKKLINEKKEDGKVFWQNLAGYKRQEALRPYLSSEEDRKKGKKFARYQLGDLLLHLEKKHGEDWGDVYDEAWERIDKKVEGLSKHIKLEEERRSEDAQSKAALTDWLRAKASFVIEGLKEADKDEFCRCELKLQKWYGDLRGKPFAIEAENSILDISGFSKQYNCAFIWQKDGVKKLNLYLIINYFKGGKLRFKKIKPEAFEANRFYTVINKKSGEIVPMEVNFNFDDPNLIILPLAFGKRQGREFIWNDLLSLETGSLKLANGRVIEKTLYNRRTRQDEPALFVALTFERREVLDSSNIKPMNLIGVDRGENIPAVIALTDPEGCPLSRFKDSLGNPTHILRIGESYKEKQRTIQAKKEVEQRRAGGYSRKYASKAKNLADDMVRNTARDLLYYAVTQDAMLIFENLSRGFGRQGKRTFMAERQYTRMEDWLTAKLAYEGLPSKTYLSKTLAQYTSKTCSNCGFTITSADYDRVLEKLKKTATGWMTTINGKELKVEGQITYYNRYKRQNVVKDLSVELDRLSEESVNNDISSWTKGRQGEALSLLKKRFSHRPVQEKFVCLNCGFETHADEQAALNIARSWLFLRSQEYKKYQTNKTTGNTDKRAFVETWQSFYRKKLKEVWKPAV

SEQ ID NO: 49491 - protein, 978 aa, synthetic construct
  REGION 1..978: note = engineered CasX variant
QEIKRINKIRRRLVKDSNTKKAGKTGPMKTLLVRVMTPDLRERLENLRKKPENIPQPISNTSRANLNKLLTDYTEMKKAILHVYWEEFQKDPVGLMSRVAQPASKKIDQNKLKPEMDEKGNLTTAGFACSQCGQPLFVYKLEQVSEKGKAYTNYFGRCNVAEHEKLILLAQLKPEKDSDEAVTYSLGKFGQRALDFYSIHVTKESTHPVKPLAQIAGNRYASGPVGKALRDACMGTIASFLSKYQDIIIEHQKVVKGNQKRLESLRELAGKENLEYPSVTLPPQPHTKEGVDAYNEVIARVRMWVNLNLWQKLKLSRDDAKPLLRLKGFPSFPLVERQANEVDWWDMVCNVKKLINEKKEDGKVFWQNLAGYKRQEALRPYLSSEEDRKKGKKFARYQLGDLLLHLEKKHGEDWGKVYGEAWERIDKKVEGLSKHIKLEEERRSEDAQSKAALTDWLRAKASFVIEGLKEADKDEFCRCELKLQKWYGDLRGKPFAIEAENSILDISGFSKQYNCAFIWQKDGVKKLNLYLIINYFKGGKLRFKKIKPEAFEANRFYTVINKKSGEIVPMEVNFNFDDPNLIILPLAFGKRQGREFIWNDLLSLETGSLKLANGRVIEKTLYNRRTRQDEPALFVALTFERREVLDSSNIKPMNLIGVDRGENIPAVIALTDPEGCPLSRFKDSLGNPTHILRIGESYKEKQRTIQAKKEVEQRRAGGYSRKYASKAKNLADDMVRNTARDLLYYAVTQDAMLIFENLSRGFGRQGKRTFMAERQYTRMEDWLTAKLAYEGLPSKTYLSKTLAQYTSKTCSNCGFTITSADYDRVLEKLKKTATGWMTTINGKELKVEGQITYYNRYKRQNVVKDLSVELDRLSEESVNNDISSWTKGRQGEALSLLKKRFSHRPVQEKFVCLNCGFETHADEQAALNIARSWLFLRSQEYKKYQTNKTTGNTDKRAFVETWQSFYRKKLKEVWKPAV

SEQ ID NO: 49492 - protein, 978 aa, synthetic construct
  REGION 1..978: note = engineered CasX variant
QEIKRINKIRRRLVKDSNTKKAGKTGPMKTLLVRVMTPDLRERLENLRKKPENIPQPISNTSRANLNKLLTDYTEMKKAILHVYWEEFQKDPVGLMSRVAQPASKKIDQNKLKPEMDEKGNLTTAGFACSQCGQPLFVYKLEQVSEKGKAYTNYFGRCNVAEHEKLILLAQLKPEKDSDEAVTYSLGKFGQRALDFYSIHVTKESTHPVKPLAQIAGNRYASGPVGKALRDACMGTIASFLSKYQDIIIEHQKVVKGNQKRLESLRELAGKENLEYPSVTLPPQPHTKEGVDAYNEVIARVRMWVNLNLWQKLKLSRDDAKPLLRLKGFPSFPLVERQANEVDWWDMVCNVKKLINEKKEDGKVFWQNLAGYKRQEALRPYLSSEEDRKKGKKFARYQLGDLLLHLEKKHGEDWGKVYDEAWERIDKKVEGLSKHIKLEEERRSEDAQSKAALTDWLRAKASFVIEGKKEADKDEFCRCELKLQKWYGDLRGKPFAIEAENSILDISGFSKQYNCAFIWQKDGVKKLNLYLIINYFKGGKLRFKKIKPEAFEANRFYTVINKKSGEIVPMEVNFNFDDPNLIILPLAFGKRQGREFIWNDLLSLETGSLKLANGRVIEKTLYNRRTRQDEPALFVALTFERREVLDSSNIKPMNLIGVDRGENIPAVIALTDPEGCPLSRFKDSLGNPTHILRIGESYKEKQRTIQAKKEVEQRRAGGYSRKYASKAKNLADDMVRNTARDLLYYAVTQDAMLIFENLSRGFGRQGKRTFMAERQYTRMEDWLTAKLAYEGLPSKTYLSKTLAQYTSKTCSNCGFTITSADYDRVLEKLKKTATGWMTTINGKELKVEGQITYYNRYKRQNVVKDLSVELDRLSEESVNNDISSWTKGRQGEALSLLKKRFSHRPVQEKFVCLNCGFETHADEQAALNIARSWLFLRSQEYKKYQTNKTTGNTDKRAFVETWQSFYRKKLKEVWKPAV

SEQ ID NO: 49493 - protein, 978 aa, synthetic construct
  REGION 1..978: note = engineered CasX variant
QEIKRINKIRRRLVKDSNTKKAGKTGPMKTLLVRVMTPDLRERLENLRKKPENIPQPISNTSRANLNKLLTDYTEMKKAILHVYWEEFQKDPVGLMSRVAQPASKKIDQNKLKPEMDEKGNLTTAGFACSQCGQPLFVYKLEQVSEKGKAYTNYFGRCNVAEHEKLILLAQLKPEKDSDEAVTYSLGKFGQRALDFYSIHVTKESTHPVKPLAQIAGNRYASGPVGKALRDACMGTIASFLSKYQDIIIEHQKVVKGNQKRLESLRELAGKENLEYPSVTLPPQPHTKEGVDAYNEVIARVRMWVNLNLWQKLKLSRDDAKPLLRLKGFPSFPLVERQANEVDWWDMVCNVKKLINEKKEDGKVFWQNLAGYKRQEALRPYLSSEEDRKKGKKFARYQLGDLLLHLEKKHGEDWGKVYDEAWERIDKKVEGLSKHIKLEEERRSEDAQSKAALTDWLRAKASFVIEGSKEADKDEFCRCELKLQKWYGDLRGKPFAIEAENSILDISGFSKQYNCAFIWQKDGVKKLNLYLIINYFKGGKLRFKKIKPEAFEANRFYTVINKKSGEIVPMEVNFNFDDPNLIILPLAFGKRQGREFIWNDLLSLETGSLKLANGRVIEKTLYNRRTRQDEPALFVALTFERREVLDSSNIKPMNLIGVDRGENIPAVIALTDPEGCPLSRFKDSLGNPTHILRIGESYKEKQRTIQAKKEVEQRRAGGYSRKYASKAKNLADDMVRNTARDLLYYAVTQDAMLIFENLSRGFGRQGKRTFMAERQYTRMEDWLTAKLAYEGLPSKTYLSKTLAQYTSKTCSNCGFTITSADYDRVLEKLKKTATGWMTTINGKELKVEGQITYYNRYKRQNVVKDLSVELDRLSEESVNNDISSWTKGRQGEALSLLKKRFSHRPVQEKFVCLNCGFETHADEQAALNIARSWLFLRSQEYKKYQTNKTTGNTDKRAFVETWQSFYRKKLKEVWKPAV

SEQ ID NO: 49494 - protein, 979 aa, synthetic construct
  REGION 1..979: note = engineered CasX variant
QEIKRINKIRRRLVKDSNTKKAGKTGPMKTLLVRVMTPDLRERLENLRKKPENIPQPISNTSRANLNKLLTDYTEMKKAILHVYWEEFQKDPVGLMSRVAQPASKKIDQNKLKPEMDEKGNLTTAGFACSQCGQPLFVYKLEQVSEKGKAYTNYFGRCNVAEHEKLILLAQLKPEKDSDEAVTYSLGKFGQRALDFYSIHVTKESTHPVKPLAQIAGNRYASGPVGKALRDACMGTIASFLSKYQDIIIEHQKVVKGNQKRLESLRELAGKENLEYPSVTLPPQPHTKEGVDAYNEVIARVRMWVNLNLWQKLKLSRDDAKPLLRLKGFPSFPLVERQANEVDWWDMVCNVKKLINEKKEDGKVFWQNLAGYKRQEALRPYLSSEEDRKKGKKFARYQLGDLLLHLEKKHGEDWGKVYDEAWERIDKKVEGLSKHIKLEEERRSEDAQSKAALTDWLRAKASFVIEGLKEADDKDEFCRCELKLQKWYGDLRGKPFAIEAENSILDISGFSKQYNCAFIWQKDGVKKLNLYLIINYFKGGKLRFKKIKPEAFEANRFYTVINKKSGEIVPMEVNFNFDDPNLIILPLAFGKRQGREFIWNDLLSLETGSLKLANGRVIEKTLYNRRTRQDEPALFVALTFERREVLDSSNIKPMNLIGVDRGENIPAVIALTDPEGCPLSRFKDSLGNPTHILRIGESYKEKQRTIQAKKEVEQRRAGGYSRKYASKAKNLADDMVRNTARDLLYYAVTQDAMLIFENLSRGFGRQGKRTFMAERQYTRMEDWLTAKLAYEGLPSKTYLSKTLAQYTSKTCSNCGFTITSADYDRVLEKLKKTATGWMTTINGKELKVEGQITYYNRYKRQNVVKDLSVELDRLSEESVNNDISSWTKGRQGEALSLLKKRFSHRPVQEKFVCLNCGFETHADEQAALNIARSWLFLRSQEYKKYQTNKTTGNTDKRAFVETWQSFYRKKLKEVWKPAV

SEQ ID NO: 49495 - protein, 979 aa, synthetic construct
  REGION 1..979: note = engineered CasX variant
QEIKRINKIRRRLVKDSNTKKAGKTGPMKTLLVRVMTPDLRERLENLRKKPENIPQPISNTSRANLNKLLTDYTEMKKAILHVYWEEFQKDPVGLMSRVAQPASKKIDQNKLKPEMDEKGNLTTAGFACSQCGQPLFVYKLEQVSEKGKAYTNYFGRCNVAEHEKLILLAQLKPEKDSDEAVTYSLGKFGQRALDFYSIHVTKESTHPVKPLAQIAGNRYASGPVGKALRDACMGTIASFLSKYQDIIIEHQKVVKGNQKRLESLRELAGKENLEYPSVTLPPQPHTKEGVDAYNEVIARVRMWVNLNLWQKLKLSRDDAKPLLRLKGFPSFPLVERQANEVDWWDMVCNVKKLINEKKEDGKVFWQNLAGYKRQEALRPYLSSEEDRKKGKKFARYQLGDLLLHLEKKHGEDWGKVYDEAWERIDKKVEGLSKHIKLEEERRSEDAQSKAALTDWLRAKASFVIEGLKEADKDEFCRCELKLQKWYGDLRGKPFAIEAENSILDISGFSKQYNCAFIWQKDGVKKLNLYLIINYFKGGKLRFKKIKPEAFEANRFYTVINKKSGEIVPMEVNFNFDDPNLIILPLAFGKRQGREFIWNDLLSLETGSLKLANGRVIEKTLYNRRTRQDEPALFVALTFERREVLDSSNIKPMNLIGVDRGENIPAVIALTDPEGCPLSRFKDSLGNPTHILRIGESYKEKQRTIQAKKEVEQRRAGGYSRKYASKAKNLADDMVRNTARDLLYYAVTQDAMLIFENLSRGFGRQGKRTFMAERQYTRMEDWLTAKLAYEGLPSKTYLSKTLAQYTSKTCSNCGFTITSADYDRVLEKLKKTATGWMTTINGKELKVEGQITYYNRYKRQNVVKDLSVELDRLSEESVNNDISSWTKGRQGNEALSLLKKRFSHRPVQEKFVCLNCGFETHADEQAALNIARSWLFLRSQEYKKYQTNKTTGNTDKRAFVETWQSFYRKKLKEVWKPAV

SEQ ID NO: 49496 - protein, 978 aa, synthetic construct
  REGION 1..978: note = engineered CasX variant
QEIKRINKIRRRLVKDSNTKKAGKTGPMKTLLVRVMTPDLRERLENLRKKPENIPQPISNTSRANLNKLLTDYTEMKKAILHVYWEEFQKDPVGLMSRVAQPASKKIDQNKLKPEMDEKGNLTTAGFACSQCGQPLFVYKLEQVSEKGKAYTNYFGRCNVAEHEKLILLAQLKPEKDSDEAVTYSLGKFGQRALDFYSIHVTKESTHPVKPLAQIAGNRYASGPVGKALRDACMGTIASFLSKYQDIIIEHQKVVKGNQKRLESLRELAGKENLEYPSVTLPPQPHTKEGVDAYNEVIARVRMWVNLNLWQKLKLSRDDAKPLLRLKGFPSFPLVERQANEVDWWDMVCNVKKLINEKKEDGKVFWQNLAGYKRQEALRPYLSSEEDRQKGKKFARYQLGDLLLHLEKKHGEDWGKVYDEAWERIDKKVEGLSKHIKLEEERRSEDAQSKAALTDWLRAKASFVIEGLKEADKDEFCRCELKLQKWYGDLRGKPFAIEAENSILDISGFSKQYNCAFIWQKDGVKKLNLYLIINYFKGGKLRFKKIKPEAFEANRFYTVINKKSGEIVPMEVNFNFDDPNLIILPLAFGKRQGREFIWNDLLSLETGSLKLANGRVIEKTLYNRRTRQDEPALFVALTFERREVLDSSNIKPMNLIGVDRGENIPAVIALTDPEGCPLSRFKDSLGNPTHILRIGESYKEKQRTIQAKKEVEQRRAGGYSRKYASKAKNLADDMVRNTARDLLYYAVTQDAMLIFENLSRGFGRQGKRTFMAERQYTRMEDWLTAKLAYEGLPSKTYLSKTLAQYTSKTCSNCGFTITSADYDRVLEKLKKTATGWMTTINGKELKVEGQITYYNRYKRQNVVKDLSVELDRLSEESVNNDISSWTKGRQGEALSLLKKRFSHRPVQEKFVCLNCGFETHADEQAALNIARSWLFLRSQEYKKYQTNKTTGNTDKRAFVETWQSFYRKKLKEVWKPAV

SEQ ID NO: 49497 - protein, 978 aa, synthetic construct
  REGION 1..978: note = engineered CasX variant
QEIKRINKIRRRLVKDSNTKKAGKTGPMKTLLVRVMTPDLRERLENLRKKPENIPQPISNTSRANLNKLLTDYTEMKKAILHVYWEEFQKDPVGLMSRVAQPASKKIDQNKLKPEMDEKGNLTTAGFACSQCGQPLFVYKLEQVSEKGKAYTNYFGRCNVAEHEKLILLAQLKPEKDSDEAVTYSLGKFGQRALDFYSIHVTKESTHPVKPLAQIAGNRYASGPVGKALRDACMGTIASFLSKYQDIIIEHQKVVKGNQKRLESLRELAGKENLEYPSVTLPPQPHTKEGVDAYNEVIARVRMWVNLNLWQKLKLSRDDAKPLLRLKGFPSFPLVERQANEVDWWDMVCNVKKLINEKKEDGKVFWQNLAGYKRQEALRPYLSSEEDRKKGKKFARYQLGDLLLHLEKKHGEDWGKVYDEAWERIDKKVEGLSKHIKLEEERRSEDAQSKAALTDWLRAKASFVIEGLKEADKDEFCRCELKLQKWYGDLRGKPFAIEAENSILDISGFSKQYNCAFIWQKDGVKKLNLYLIINYFKGGKLRFKKIKPEAFEANRFYTVINKKSGEIVPMEVNFNFDDPNLIILPLAFGKRQGREFIWNDLLSLETGSLKLANGRVIEKTLYNRRTRQDEPALFVALTFERREVLDSSNIKPMNLIGVDRGENIPAVIALTDPEGCPLSRFKDSLGNPTHILRIGESYKEKQRTIQAKKEVEQRRAGGYSRKYASKAKNLADDMVRNTARDLLYYAVTQDAMLIFENLSRGFGRQGKRTFMAERQYTRMEDWLTAKLAYEGLPSQTYLSKTLAQYTSKTCSNCGFTITSADYDRVLEKLKKTATGWMTTINGKELKVEGQITYYNRYKRQNVVKDLSVELDRLSEESVNNDISSWTKGRQGEALSLLKKRFSHRPVQEKFVCLNCGFETHADEQAALNIARSWLFLRSQEYKKYQTNKTTGNTDKRAFVETWQSFYRKKLKEVWKPAV

SEQ ID NO: 49498 - protein, 978 aa, synthetic construct
  REGION 1..978: note = engineered CasX variant
QEIKRINKIRRRLVKDSNTKKAGKTGPMKTLLVRVMTPDLRERLENLRKKPENIPQPISNTSRANLNKLLTDYTEMKKAILHVYWEEFQKDPVGLMSRVAQPASKKIDQNKLKPEMDEKGNLTTAGFACSQCGQPLFVYKLEQVSEKGKAYTNYFGRCNVAEHEKLILLAQLKPEKDSDEAVTYSLGKFGQRALDFYSIHVTKESTHPVKPLAQIAGNRYASGPVGKALRDACMGTIASFLSKYQDIIIEHQKVVKGNQKRLESLRELAGKENLEYPSVTLPPQPHTKEGVDAYNEVIARVRMWVNLNLWQKLKLSRDDAKPLLRLKGFPSFPLVERQANEVDWWDMVCNVKKLINEKKEDGKVFWQNLAGYKRQEALRPYLSSEEDRKKGKKFARYQLGDLLLHLEKKHGEDWGKVYDEAWERIDKKVEGLSKHIKLEEERRSEDAQSKAALTDWLRAKASFVIEGLKEADKDEFCRCELKLQKWYGDLRGKPFAIEAENSILDISGFSKQYNCAFIWQKDGVKKLNLYLIINYFKGGKLRFKKIKPEAFEANRFYTVINKKSGEIVPMEVNFNFDDPNLIILPLAFGKRQGREFIWNDLLSLETGSLKLANGRVIEKTLYNRRTRQDEPALFVALTFERREVLDSSNIKPMNLIGVDRGENIPAVIALTDPEGCPLSRFKDSLGNPTHILRIGESYKEKQRTIQAKKEVEQRRAGGYSRKYASKAKNLADDMVRNTARDLLYYAVTQDAMLIFENLSRGFGRQGKRTFMAERQYTRMEDWLTAKLAYNGLPSKTYLSKTLAQYTSKTCSNCGFTITSADYDRVLEKLKKTATGWMTTINGKELKVEGQITYYNRYKRQNVVKDLSVELDRLSEESVNNDISSWTKGRQGEALSLLKKRFSHRPVQEKFVCLNCGFETHADEQAALNIARSWLFLRSQEYKKYQTNKTTGNTDKRAFVETWQSFYRKKLKEVWKPAV

SEQ ID NO: 49499 - protein, 978 aa, synthetic construct
  REGION 1..978: note = engineered CasX variant
QEIKRINKIRRRLVKDSNTKKAGKTGPMKTLLVRVMTPDLRERLENLRKKPENIPQPISNTSRANLNKLLTDYTEMKKAILHVYWEEFQKDPVGLMSRVAQPASKKIDQNKLKPEMDEKGNLTTAGFACSQCGQPLFVYKLEQVSEKGKAYTNYFGRCNVAEHEKLIQLAQLKPEKDSDEAVTYSLGKFGQRALDFYSIHVTKESTHPVKPLAQIAGNRYASGPVGKALRDACMGTIASFLSKYQDIIIEHQKVVKGNQKRLESLRELAGKENLEYPSVTLPPQPHTKEGVDAYNEVIARVRMWVNLNLWQKLKLSRDDAKPLLRLKGFPSFPLVERQANEVDWWDMVCNVKKLINEKKEDGKVFWQNLAGYKRQEALRPYLSSEEDRKKGKKFARYQLGDLLLHLEKKHGEDWGKVYDEAWERIDKKVEGLSKHIKLEEERRSEDAQSKAALTDWLRAKASFVIEGLKEADKDEFCRCELKLQKWYGDLRGKPFAIEAENSILDISGFSKQYNCAFIWQKDGVKKLNLYLIINYFKGGKLRFKKIKPEAFEANRFYTVINKKSGEIVPMEVNFNFDDPNLIILPLAFGKRQGREFIWNDLLSLETGSLKLANGRVIEKTLYNRRTRQDEPALFVALTFERREVLDSSNIKPMNLIGVDRGENIPAVIALTDPEGCPLSRFKDSLGNPTHILRIGESYKEKQRTIQAKKEVEQRRAGGYSRKYASKAKNLADDMVRNTARDLLYYAVTQDAMLIFENLSRGFGRQGKRTFMAERQYTRMEDWLTAKLAYEGLPSKTYLSKTLAQYTSKTCSNCGFTITSADYDRVLEKLKKTATGWMTTINGKELKVEGQITYYNRYKRQNVVKDLSVELDRLSEESVNNDISSWTKGRQGEALSLLKKRFSHRPVQEKFVCLNCGFETHADEQAALNIARSWLFLRSQEYKKYQTNKTTGNTDKRAFVETWQSFYRKKLKEVWKPAV

SEQ ID NO: 49500 - protein, 978 aa, synthetic construct
  REGION 1..978: note = engineered CasX variant
QEIKRINKIRRRLVKDSNTKKAGKTGPMKTLLVRVMTPDLRERLENLRKKPENIPQPISNTSRANLNKLLTDYTEMKKAILHVYWEEFQKDPVGLMSRVAQPASKKIDQNKLKPEMDEKGNLTTAGFACSQCGQPLFVYKLEQVSEKGKAYTNYFGRCNVAEHEKLILLAQLKPEKDSDEAVTYSLGKFGQRALDFYSIHVTKESTHPVKPLAQIAGNRYASGPVGKALRDACMGTIASFLSKYQDIIIEHQKVVKGNQKRLESLRELAGKENLEYPSVTLPPQPHTKEGVDAYNEVIARVRMWVNLNLWQKLKLSRDDAKPLLRLKGFPSFPLVERQANEVDWWDMVCNVKKLINEKKEDGKVFWQNLAIYKRQEALRPYLSSEEDRKKGKKFARYQLGDLLLHLEKKHGEDWGKVYDEAWERIDKKVEGLSKHIKLEEERRSEDAQSKAALTDWLRAKASFVIEGLKEADKDEFCRCELKLQKWYGDLRGKPFAIEAENSILDISGFSKQYNCAFIWQKDGVKKLNLYLIINYFKGGKLRFKKIKPEAFEANRFYTVINKKSGEIVPMEVNFNFDDPNLIILPLAFGKRQGREFIWNDLLSLETGSLKLANGRVIEKTLYNRRTRQDEPALFVALTFERREVLDSSNIKPMNLIGVDRGENIPAVIALTDPEGCPLSRFKDSLGNPTHILRIGESYKEKQRTIQAKKEVEQRRAGGYSRKYASKAKNLADDMVRNTARDLLYYAVTQDAMLIFENLSRGFGRQGKRTFMAERQYTRMEDWLTAKLAYEGLPSKTYLSKTLAQYTSKTCSNCGFTITSADYDRVLEKLKKTATGWMTTINGKELKVEGQITYYNRYKRQNVVKDLSVELDRLSEESVNNDISSWTKGRQGEALSLLKKRFSHRPVQEKFVCLNCGFETHADEQAALNIARSWLFLRSQEYKKYQTNKTTGNTDKRAFVETWQSFYRKKLKEVWKPAV

SEQ ID NO: 49501 - protein, 978 aa, synthetic construct
  REGION 1..978: note = engineered CasX variant
QEIKRINKIRRRLVKDSNTKKAGKTGPMKTLLVRVMTPDLRERLENLRKKPENIPQPISNTSRANLNKLLTDYTEMKKAILHVYWEEFQKDPVGLMSRVAQPASKKIDQNKLKPEMDEKGNLTTAGFACSQCGQPLFVYKLEQVSEKGKAYTNYFGRCNVAEHEKLILLAQLKPEKDSDEAVTYSLGKFGQRALDFYSIHVTKESTHPVKPLAQIAGNRYASGPVGKALRDACMGTIASFLSKYQDIIIEHQKVVKGNQKRLESLRELAGKENLEYPSVTLPPQPHTKEGVDAYNEVIARVRMWVNLNLWQKLKLSRDDAKPLLRLKGFPSFPLVERQANEVDWWDMVCNVKKLINEKKEDGKVFWQNLAGYKRQEALRPYLSSEEDREKGKKFARYQLGDLLLHLEKKHGEDWGKVYDEAWERIDKKVEGLSKHIKLEEERRSEDAQSKAALTDWLRAKASFVIEGLKEADKDEFCRCELKLQKWYGDLRGKPFAIEAENSILDISGFSKQYNCAFIWQKDGVKKLNLYLIINYFKGGKLRFKKIKPEAFEANRFYTVINKKSGEIVPMEVNFNFDDPNLIILPLAFGKRQGREFIWNDLLSLETGSLKLANGRVIEKTLYNRRTRQDEPALFVALTFERREVLDSSNIKPMNLIGVDRGENIPAVIALTDPEGCPLSRFKDSLGNPTHILRIGESYKEKQRTIQAKKEVEQRRAGGYSRKYASKAKNLADDMVRNTARDLLYYAVTQDAMLIFENLSRGFGRQGKRTFMAERQYTRMEDWLTAKLAYEGLPSKTYLSKTLAQYTSKTCSNCGFTITSADYDRVLEKLKKTATGWMTTINGKELKVEGQITYYNRYKRQNVVKDLSVELDRLSEESVNNDISSWTKGRQGEALSLLKKRFSHRPVQEKFVCLNCGFETHADEQAALNIARSWLFLRSQEYKKYQTNKTTGNTDKRAFVETWQSFYRKKLKEVWKPAV

SEQ ID NO: 49502 - protein, 978 aa, synthetic construct
  REGION 1..978: note = engineered CasX variant
QEIKRINKIRRRLVKDSNTKKAGKTGPMKTLLVRVMTPDLRERLENLRKKPENIPQPISNTSRANLNKLLTDYTEMKKAILHVYWEEFQKDPVGLMSRVAQPASKKIDQNKLKPEMDEKGNLTTAGFACSQCGQPLFVYKLEQVSEKGKAYTNYFGRCNVAEHEKLILLAQLKPEKDSDEAVTYSLGKFGQRALDFYSIHVTKESTHPVKPLAQIAGNRYASGPVGKALRDACMGTIASFLSKYQDIIIEHQKVVKGNQKRLESLRELAGKENLEYPSVTLPPQPHTKEGVDAYNEVIARVRMWVNLNLWQKLKLSRDDAKPLLRLKGFPSFPLVERQANEVDWWDMVCNVKKLINEKKEDGKVFWQNLAGYKRQEALRPYLSSEEDRKKGKKFARYQLGDLLLHLEKKHGEDWGKVYDEAWERIDKKVEGLSKHIKLEEERRSEDAQSKAALTDWLRAKASFVIEGLKEADKDEFCRCELKLQKWYGDLRGKPFAIEAENSILDISGFSKQYNCAFIWQKDGVKKLNLYLIINYFKGGKLRFKKIKPEAFEANRFYTVINKKSGEIVIMEVNFNFDDPNLIILPLAFGKRQGREFIWNDLLSLETGSLKLANGRVIEKTLYNRRTRQDEPALFVALTFERREVLDSSNIKPMNLIGVDRGENIPAVIALTDPEGCPLSRFKDSLGNPTHILRIGESYKEKQRTIQAKKEVEQRRAGGYSRKYASKAKNLADDMVRNTARDLLYYAVTQDAMLIFENLSRGFGRQGKRTFMAERQYTRMEDWLTAKLAYEGLPSKTYLSKTLAQYTSKTCSNCGFTITSADYDRVLEKLKKTATGWMTTINGKELKVEGQITYYNRYKRQNVVKDLSVELDRLSEESVNNDISSWTKGRQGEALSLLKKRFSHRPVQEKFVCLNCGFETHADEQAALNIARSWLFLRSQEYKKYQTNKTTGNTDKRAFVETWQSFYRKKLKEVWKPAV

SEQ ID NO: 49503 - protein, 978 aa, synthetic construct
  REGION 1..978: note = engineered CasX variant
QEIKRINKIRRRLVKDSNTKKAGKTGPMKTLLVRVMTPDLRERLENLRKKPENIPQPISNTSRANLNKLLTDYTEMKKAILHVYWEEFQKDPVGLMSRVAQPASKKIDQNKLKPEMDEKGNLTTAGFACSQCGQPLFVYKLEQVSEKGKAYTNYFGRCNVAEHEKLILLAQLKPEKDSDEAVTYSLGKFGQRALDFYSIHVTKESTHPVKPLAQIAGNRYASGPVGKALRGACMGTIASFLSKYQDIIIEHQKVVKGNQKRLESLRELAGKENLEYPSVTLPPQPHTKEGVDAYNEVIARVRMWVNLNLWQKLKLSRDDAKPLLRLKGFPSFPLVERQANEVDWWDMVCNVKKLINEKKEDGKVFWQNLAGYKRQEALRPYLSSEEDRKKGKKFARYQLGDLLLHLEKKHGEDWGKVYDEAWERIDKKVEGLSKHIKLEEERRSEDAQSKAALTDWLRAKASFVIEGLKEADKDEFCRCELKLQKWYGDLRGKPFAIEAENSILDISGFSKQYNCAFIWQKDGVKKLNLYLIINYFKGGKLRFKKIKPEAFEANRFYTVINKKSGEIVPMEVNFNFDDPNLIILPLAFGKRQGREFIWNDLLSLETGSLKLANGRVIEKTLYNRRTRQDEPALFVALTFERREVLDSSNIKPMNLIGVDRGENIPAVIALTDPEGCPLSRFKDSLGNPTHILRIGESYKEKQRTIQAKKEVEQRRAGGYSRKYASKAKNLADDMVRNTARDLLYYAVTQDAMLIFENLSRGFGRQGKRTFMAERQYTRMEDWLTAKLAYEGLPSKTYLSKTLAQYTSKTCSNCGFTITSADYDRVLEKLKKTATGWMTTINGKELKVEGQITYYNRYKRQNVVKDLSVELDRLSEESVNNDISSWTKGRSGEALSLLKKRFSHRPVQEKFVCLNCEFETHADEQAALNIARSWLFLRSQEYKKYQTNKTTGNTDKRAFVETWQSFYRKKLKEVWKPAV

SEQ ID NO: 49504 - protein, 978 aa, synthetic construct
  REGION 1..978: note = engineered CasX variant
QEIKRINKIRRRLVKDSNTKKAGKTGPMKTLLVRVMTPDLRERLENLRKKPENIPQPISNTSRANLNKLLTDYTEMKKAILHVYWEEFQKDPVGLMSRVAQPASKKIDQNKLKPEMDEKGNLTTAGFACSQCGQPLFVYKLEQVSEKGKAYTNYFGRCNVAEHEKLILLAQLKPEKDSDEAVTYSLGKFGQRALDFYSIHVTKESTHPVKPLAQIAGNRYASGPVGKALRDACMGTIASFLSKYQDIIIEHQKVVKGNQKRLESLRELAGKENLEYPSVTLPPQPHTKEGVDAYNEVIARVRMWVNLNLWQKLKLSRDDAKPLLRLKNFPSFPLVERQANEVDWWDMVCNVKKLINEKKEDGKVFWQNLAGYKRQEALRPYLSSEEDRKKGKKFARYQLGDLLLHLEKKHGEDWGKVYDEAWERIDKKVEGLSKHIKLEEERRSEDAQSKAALTDWLRAKASFVIEGLKEADKDEFCRCELKLQKWYGDLRGKPFAIEAENSILDISGFSKQYNCAFIWQKDGVKKLNLYLIINYFKGGKLRFKKIKPEAFEANRFYTVINKKSGEIVPMEVNFNFDDPNLIILPLAFGKRQGREFIWNDLLSLETGSLKLANGRVIEKTLYNRRTRQDEPALFVALTFERREVLDSSNIKPMNLIGVDRGENIPAVIALTDPEGCPLSRFKDSLGNPTHILRIGESYKEKQRTIQAKKEVEQRRAGGYSRKYASKAKNLADDMVRNTARDLLYYAVTQDAMLIFENLSRGFGRQGKRTFMAERQYTRMEDWLTAKLAYEGLPSKTYLSKTLAQYTSKTCSNCGFTITSADYDRVLEKLKKTATGWMTTINGKELKVEGQITYYNRYKRQNVVKDLSVELDRLSEESVNNDISSWTKGRSGEALSLLKKRFSHRPVQEKFVCLNCEFETHADEQAALNIARSWLFLRSQEYKKYQTNKTTGNTDKRAFVETWQSFYRKKLKEVWKPAV

SEQ ID NO: 49505 - protein, 978 aa, synthetic construct
  REGION 1..978: note = engineered CasX variant
QEIKRINKIRRRLVKDSNTKKAGKTGPMKTLLVRVMTPDLRERLENLRKKPENIPQPISNTSRANLNKLLTDYTEMKKAILHVYWEEFQKDPVGLMSRVAQPASKKIDQNKLKPEMDEKGNLTTAGFACSQCGQPLFVYKLEQVSEKGKAYTNYFGRCNVAEHEKLILLAQLKPEKDSDEAVTYSLGKFGQRALDFYSIHVTKESTHPVKPLAQIAGNRYASGPVGKALRDACMGTIASFLSKYQDIIIEHQKVVKGNQKRLESLRELAGKENLEYPSVTLPPQPHTKEGVDAYNEVIARVRMWVNLNLWQKLKLSRDDAKPLLRLKGFPSFPLVERQANEVDWWDMVCNVKKLINEKKEDGKVFWQNLAGYKRQEALRPYLSSEEDRKKGKKFARYQLGDLLNHLEKKHGEDWGKVYDEAWERIDKKVEGLSKHIKLEEERRSEDAQSKAALTDWLRAKASFVIEGLKEADKDEFCRCELKLQKWYGDLRGKPFAIEAENSILDISGFSKQYNCAFIWQKDGVKKLNLYLIINYFKGGKLRFKKIKPEAFEANRFYTVINKKSGEIVPMEVNFNFDDPNLIILPLAFGKRQGREFIWNDLLSLETGSLKLANGRVIEKTLYNRRTRQDEPALFVALTFERREVLDSSNIKPMNLIGVDRGENIPAVIALTDPEGCPLSRFKDSLGNPTHILRIGESYKEKQRTIQAKKEVEQRRAGGYSRKYASKAKNLADDMVRNTARDLLYYAVTQDAMLIFENLSRGFGRQGKRTFMAERQYTRMEDWLTAKLAYEGLPSKTYLSKTLAQYTSKTCSNCGFTITSADYDRVLEKLKKTATGWMTTINGKELKVEGQITYYNRYKRQNVVKDLSVELDRLSEESVNNDISSWTKGRSGEALSLLKKRFSHRPVQEKFVCLNCEFETHADEQAALNIARSWLFLRSQEYKKYQTNKTTGNTDKRAFVETWQSFYRKKLKEVWKPAV

SEQ ID NO: 49506 - protein, 978 aa, synthetic construct
  REGION 1..978: note = engineered CasX variant
QEIKRINKIRRRLVKDSNTKKAGKTGPMKTLLVRVMTPDLRERLENLRKKPENIPQPISNTSRANLNKLLTDYTEMKKAILHVYWEEFQKDPVGLMSRVAQPASKKIDQNKLKPEMDEKGNLTTAGFACSQCGQPLFVYKLEQVSEKGKAYTNYFGRCNVAEHEKLILLAQLKPEKDSDEAVTYSLGKFGQRALDFYSIHVTKESTHPVKPLAQIAGNRYASGPVGKALRDACMGTIASFLSKYQDIIIEHQKVVKGNQKRLESLRELAGKENLEYPSVTLPPQPHTKEGVDAYNEVIARVRMWVNLNLWQKLKLSRDDAKPLLRLKGFPSFPLVERQANEVDWWDMVCNVKKLINEKKEDGKVFWQNLAGYKRQEALRPYLSSEEDRKKGKKFARYQLGDLLWHLEKKHGEDWGKVYDEAWERIDKKVEGLSKHIKLEEERRSEDAQSKAALTDWLRAKASFVIEGLKEADKDEFCRCELKLQKWYGDLRGKPFAIEAENSILDISGFSKQYNCAFIWQKDGVKKLNLYLIINYFKGGKLRFKKIKPEAFEANRFYTVINKKSGEIVPMEVNFNFDDPNLIILPLAFGKRQGREFIWNDLLSLETGSLKLANGRVIEKTLYNRRTRQDEPALFVALTFERREVLDSSNIKPMNLIGVDRGENIPAVIALTDPEGCPLSRFKDSLGNPTHILRIGESYKEKQRTIQAKKEVEQRRAGGYSRKYASKAKNLADDMVRNTARDLLYYAVTQDAMLIFENLSRGFGRQGKRTFMAERQYTRMEDWLTAKLAYEGLPSKTYLSKTLAQYTSKTCSNCGFTITSADYDRVLEKLKKTATGWMTTINGKELKVEGQITYYNRYKRQNVVKDLSVELDRLSEESVNNDISSWTKGRSGEALSLLKKRFSHRPVQEKFVCLNCEFETHADEQAALNIARSWLFLRSQEYKKYQTNKTTGNTDKRAFVETWQSFYRKKLKEVWKPAV

SEQ ID NO: 49507 - protein, 978 aa, synthetic construct
  REGION 1..978: note = engineered CasX variant
QEIKRINKIRRRLVKDSNTKKAGKTGPMKTLLVRVMTPDLRERLENLRKKPENIPQPISNTSRANLNKLLTDYTEMKKAILHVYWEEFQKDPVGLMSRVAQPASKKIDQNKLKPEMDEKGNLTTAGFACSQCGQPLFVYKLEQVSEKGKAYTNYFGRCNVAEHEKLILLAQLKPEKDSDEAVTYSLGKFGQRALDFYSIHVTKESTHPVKPLAQIAGNRYASGPVGKALRDACMGTIASFLSKYQDIIIEHQKVVKGNQKRLESLRELAGKENLEYPSVTLPPQPHTKEGVDAYNEVIARVRMWVNLNLWQKLKLSRDDAKPLLRLKGFPSFPLVERQANEVDWWDMVCNVKKLINEKKEDGKVFWQNLAGYKRQEALRPYLSSEEDRKKGKKFARYQLGDLLLHLYKKHGEDWGKVYDEAWERIDKKVEGLSKHIKLEEERRSEDAQSKAALTDWLRAKASFVIEGLKEADKDEFCRCELKLQKWYGDLRGKPFAIEAENSILDISGFSKQYNCAFIWQKDGVKKLNLYLIINYFKGGKLRFKKIKPEAFEANRFYTVINKKSGEIVPMEVNFNFDDPNLIILPLAFGKRQGREFIWNDLLSLETGSLKLANGRVIEKTLYNRRTRQDEPALFVALTFERREVLDSSNIKPMNLIGVDRGENIPAVIALTDPEGCPLSRFKDSLGNPTHILRIGESYKEKQRTIQAKKEVEQRRAGGYSRKYASKAKNLADDMVRNTARDLLYYAVTQDAMLIFENLSRGFGRQGKRTFMAERQYTRMEDWLTAKLAYEGLPSKTYLSKTLAQYTSKTCSNCGFTITSADYDRVLEKLKKTATGWMTTINGKELKVEGQITYYNRYKRQNVVKDLSVELDRLSEESVNNDISSWTKGRSGEALSLLKKRFSHRPVQEKFVCLNCEFETHADEQAALNIARSWLFLRSQEYKKYQTNKTTGNTDKRAFVETWQSFYRKKLKEVWKPAV

SEQ ID NO: 49508 - protein, 978 aa, synthetic construct
  REGION 1..978: note = engineered CasX variant
QEIKRINKIRRRLVKDSNTKKAGKTGPMKTLLVRVMTPDLRERLENLRKKPENIPQPISNTSRANLNKLLTDYTEMKKAILHVYWEEFQKDPVGLMSRVAQPASKKIDQNKLKPEMDEKGNLTTAGFACSQCGQPLFVYKLEQVSEKGKAYTNYFGRCNVAEHEKLILLAQLKPEKDSDEAVTYSLGKFGQRALDFYSIHVTKESTHPVKPLAQIAGNRYASGPVGKALRDACMGTIASFLSKYQDIIIEHQKVVKGNQKRLESLRELAGKENLEYPSVTLPPQPHTKEGVDAYNEVIARVRMWVNLNLWQKLKLSRDDAKPLLRLKGFPSFPLVERQANEVDWWDMVCNVKKLINEKKEDGKVFWQNLAGYKRQEALRPYLSSEEDRKKGKKFARYQLGDLLLHLEKKHPEDWGKVYDEAWERIDKKVEGLSKHIKLEEERRSEDAQSKAALTDWLRAKASFVIEGLKEADKDEFCRCELKLQKWYGDLRGKPFAIEAENSILDISGFSKQYNCAFIWQKDGVKKLNLYLIINYFKGGKLRFKKIKPEAFEANRFYTVINKKSGEIVPMEVNFNFDDPNLIILPLAFGKRQGREFIWNDLLSLETGSLKLANGRVIEKTLYNRRTRQDEPALFVALTFERREVLDSSNIKPMNLIGVDRGENIPAVIALTDPEGCPLSRFKDSLGNPTHILRIGESYKEKQRTIQAKKEVEQRRAGGYSRKYASKAKNLADDMVRNTARDLLYYAVTQDAMLIFENLSRGFGRQGKRTFMAERQYTRMEDWLTAKLAYEGLPSKTYLSKTLAQYTSKTCSNCGFTITSADYDRVLEKLKKTATGWMTTINGKELKVEGQITYYNRYKRQNVVKDLSVELDRLSEESVNNDISSWTKGRSGEALSLLKKRFSHRPVQEKFVCLNCEFETHADEQAALNIARSWLFLRSQEYKKYQTNKTTGNTDKRAFVETWQSFYRKKLKEVWKPAV

SEQ ID NO: 49509 - protein, 979 aa, synthetic construct
  REGION 1..979: note = engineered CasX variant
QEIKRINKIRRRLVKDSNTKKAGKTGPMKTLLVRVMTPDLRERLENLRKKPENIPQPISNTSRANLNKLLTDYTEMKKAILHVYWEEFQKDPVGLMSRVAQPASKKIDQNKLKPEMDEKGNLTTAGFACSQCGQPLFVYKLEQVSEKGKAYTNYFGRCNVAEHEKLILLAQLKPEKDSDEAVTYSLGKFGQRALDFYSIHVTKESTHPVKPLAQIAGNRYASGPVGKALRDACMGTIASFLSKYQDIIIEHQKVVKGNQKRLESLRELAGKENLEYPSVTLPPQPHTKEGVDAYNEVIARVRMWVNLNLWQKLKLSRDDAKPLLRLKGFPSFPLVERQANEVDWWDMVCNVKKLINEKKEDGKVFWQNLAGYKRQEALRPYLSSEEDRKKGKKFARYQLGDLLLHLEKKHGERDWGKVYDEAWERIDKKVEGLSKHIKLEEERRSEDAQSKAALTDWLRAKASFVIEGLKEADKDEFCRCELKLQKWYGDLRGKPFAIEAENSILDISGFSKQYNCAFIWQKDGVKKLNLYLIINYFKGGKLRFKKIKPEAFEANRFYTVINKKSGEIVPMEVNFNFDDPNLIILPLAFGKRQGREFIWNDLLSLETGSLKLANGRVIEKTLYNRRTRQDEPALFVALTFERREVLDSSNIKPMNLIGVDRGENIPAVIALTDPEGCPLSRFKDSLGNPTHILRIGESYKEKQRTIQAKKEVEQRRAGGYSRKYASKAKNLADDMVRNTARDLLYYAVTQDAMLIFENLSRGFGRQGKRTFMAERQYTRMEDWLTAKLAYEGLPSKTYLSKTLAQYTSKTCSNCGFTITSADYDRVLEKLKKTATGWMTTINGKELKVEGQITYYNRYKRQNVVKDLSVELDRLSEESVNNDISSWTKGRSGEALSLLKKRFSHRPVQEKFVCLNCEFETHADEQAALNIARSWLFLRSQEYKKYQTNKTTGNTDKRAFVETWQSFYRKKLKEVWKPAV

SEQ ID NO: 49510 - protein, 979 aa, synthetic construct
  REGION 1..979: note = engineered CasX variant
QEIKRINKIRRRLVKDSNTKKAGKTGPMKTLLVRVMTPDLRERLENLRKKPENIPQPISNTSRANLNKLLTDYTEMKKAILHVYWEEFQKDPVGLMSRVAQPASKKIDQNKLKPEMDEKGNLTTAGFACSQCGQPLFVYKLEQVSEKGKAYTNYFGRCNVAEHEKLILLAQLKPEKDSDEAVTYSLGKFGQRALDFYSIHVTKESTHPVKPLAQIAGNRYASGPVGKALRDACMGTIASFLSKYQDIIIEHQKVVKGNQKRLESLRELAGKENLEYPSVTLPPQPHTKEGVDAYNEVIARVRMWVNLNLWQKLKLSRDDAKPLLRLKGFPSFPLVERQANEVDWWDMVCNVKKLINEKKEDGKVFWQNLAGYKRQEALRPYLSSEEDRKKGKKFARYQLGDLLLHLEKKHGEYDWGKVYDEAWERIDKKVEGLSKHIKLEEERRSEDAQSKAALTDWLRAKASFVIEGLKEADKDEFCRCELKLQKWYGDLRGKPFAIEAENSILDISGFSKQYNCAFIWQKDGVKKLNLYLIINYFKGGKLRFKKIKPEAFEANRFYTVINKKSGEIVPMEVNFNFDDPNLIILPLAFGKRQGREFIWNDLLSLETGSLKLANGRVIEKTLYNRRTRQDEPALFVALTFERREVLDSSNIKPMNLIGVDRGENIPAVIALTDPEGCPLSRFKDSLGNPTHILRIGESYKEKQRTIQAKKEVEQRRAGGYSRKYASKAKNLADDMVRNTARDLLYYAVTQDAMLIFENLSRGFGRQGKRTFMAERQYTRMEDWLTAKLAYEGLPSKTYLSKTLAQYTSKTCSNCGFTITSADYDRVLEKLKKTATGWMTTINGKELKVEGQITYYNRYKRQNVVKDLSVELDRLSEESVNNDISSWTKGRSGEALSLLKKRFSHRPVQEKFVCLNCEFETHADEQAALNIARSWLFLRSQEYKKYQTNKTTGNTDKRAFVETWQSFYRKKLKEVWKPAV

SEQ ID NO: 49511 - protein, 978 aa, synthetic construct
  REGION 1..978: note = engineered CasX variant
QEIKRINKIRRRLVKDSNTKKAGKTGPMKTLLVRVMTPDLRERLENLRKKPENIPQPISNTSRANLNKLLTDYTEMKKAILHVYWEEFQKDPVGLMSRVAQPASKKIDQNKLKPEMDEKGNLTTAGFACSQCGQPLFVYKLEQVSEKGKAYTNYFGRCNVAEHEKLILLAQLKPEKDSDEAVTYSLGKFGQRALDFYSIHVTKESTHPVKPLAQIAGNRYASGPVGKALRDACMGTIASFLSKYQDIIIEHQKVVKGNQKRLESLRELAGKENLEYPSVTLPPQPHTKEGVDAYNEVIARVRMWVNLNLWQKLKLSRDDAKPLLRLKGFPSFPLVERQANEVDWWDMVCNVKKLINEKKEDGKVFWQNLAGYKRQEALRPYLSSEEDRKKGKKFARYQLGDLLLHLEKKHGEDWGDVYDEAWERIDKKVEGLSKHIKLEEERRSEDAQSKAALTDWLRAKASFVIEGLKEADKDEFCRCELKLQKWYGDLRGKPFAIEAENSILDISGFSKQYNCAFIWQKDGVKKLNLYLIINYFKGGKLRFKKIKPEAFEANRFYTVINKKSGEIVPMEVNFNFDDPNLIILPLAFGKRQGREFIWNDLLSLETGSLKLANGRVIEKTLYNRRTRQDEPALFVALTFERREVLDSSNIKPMNLIGVDRGENIPAVIALTDPEGCPLSRFKDSLGNPTHILRIGESYKEKQRTIQAKKEVEQRRAGGYSRKYASKAKNLADDMVRNTARDLLYYAVTQDAMLIFENLSRGFGRQGKRTFMAERQYTRMEDWLTAKLAYEGLPSKTYLSKTLAQYTSKTCSNCGFTITSADYDRVLEKLKKTATGWMTTINGKELKVEGQITYYNRYKRQNVVKDLSVELDRLSEESVNNDISSWTKGRSGEALSLLKKRFSHRPVQEKFVCLNCEFETHADEQAALNIARSWLFLRSQEYKKYQTNKTTGNTDKRAFVETWQSFYRKKLKEVWKPAV

SEQ ID NO: 49512 - protein, 978 aa, synthetic construct
  REGION 1..978: note = engineered CasX variant
QEIKRINKIRRRLVKDSNTKKAGKTGPMKTLLVRVMTPDLRERLENLRKKPENIPQPISNTSRANLNKLLTDYTEMKKAILHVYWEEFQKDPVGLMSRVAQPASKKIDQNKLKPEMDEKGNLTTAGFACSQCGQPLFVYKLEQVSEKGKAYTNYFGRCNVAEHEKLILLAQLKPEKDSDEAVTYSLGKFGQRALDFYSIHVTKESTHPVKPLAQIAGNRYASGPVGKALRDACMGTIASFLSKYQDIIIEHQKVVKGNQKRLESLRELAGKENLEYPSVTLPPQPHTKEGVDAYNEVIARVRMWVNLNLWQKLKLSRDDAKPLLRLKGFPSFPLVERQANEVDWWDMVCNVKKLINEKKEDGKVFWQNLAGYKRQEALRPYLSSEEDRKKGKKFARYQLGDLLLHLEKKHGEDWGKVYGEAWERIDKKVEGLSKHIKLEEERRSEDAQSKAALTDWLRAKASFVIEGLKEADKDEFCRCELKLQKWYGDLRGKPFAIEAENSILDISGFSKQYNCAFIWQKDGVKKLNLYLIINYFKGGKLRFKKIKPEAFEANRFYTVINKKSGEIVPMEVNFNFDDPNLIILPLAFGKRQGREFIWNDLLSLETGSLKLANGRVIEKTLYNRRTRQDEPALFVALTFERREVLDSSNIKPMNLIGVDRGENIPAVIALTDPEGCPLSRFKDSLGNPTHILRIGESYKEKQRTIQAKKEVEQRRAGGYSRKYASKAKNLADDMVRNTARDLLYYAVTQDAMLIFENLSRGFGRQGKRTFMAERQYTRMEDWLTAKLAYEGLPSKTYLSKTLAQYTSKTCSNCGFTITSADYDRVLEKLKKTATGWMTTINGKELKVEGQITYYNRYKRQNVVKDLSVELDRLSEESVNNDISSWTKGRSGEALSLLKKRFSHRPVQEKFVCLNCEFETHADEQAALNIARSWLFLRSQEYKKYQTNKTTGNTDKRAFVETWQSFYRKKLKEVWKPAV

SEQ ID NO: 49513 - protein, 978 aa, synthetic construct
  REGION 1..978: note = engineered CasX variant
QEIKRINKIRRRLVKDSNTKKAGKTGPMKTLLVRVMTPDLRERLENLRKKPENIPQPISNTSRANLNKLLTDYTEMKKAILHVYWEEFQKDPVGLMSRVAQPASKKIDQNKLKPEMDEKGNLTTAGFACSQCGQPLFVYKLEQVSEKGKAYTNYFGRCNVAEHEKLILLAQLKPEKDSDEAVTYSLGKFGQRALDFYSIHVTKESTHPVKPLAQIAGNRYASGPVGKALRDACMGTIASFLSKYQDIIIEHQKVVKGNQKRLESLRELAGKENLEYPSVTLPPQPHTKEGVDAYNEVIARVRMWVNLNLWQKLKLSRDDAKPLLRLKGFPSFPLVERQANEVDWWDMVCNVKKLINEKKEDGKVFWQNLAGYKRQEALRPYLSSEEDRKKGKKFARYQLGDLLLHLEKKHGEDWGKVYDEAWERIDKKVEGLSKHIKLEEERRSEDAQSKAALTDWLRAKASFVIEGKKEADKDEFCRCELKLQKWYGDLRGKPFAIEAENSILDISGFSKQYNCAFIWQKDGVKKLNLYLIINYFKGGKLRFKKIKPEAFEANRFYTVINKKSGEIVPMEVNFNFDDPNLIILPLAFGKRQGREFIWNDLLSLETGSLKLANGRVIEKTLYNRRTRQDEPALFVALTFERREVLDSSNIKPMNLIGVDRGENIPAVIALTDPEGCPLSRFKDSLGNPTHILRIGESYKEKQRTIQAKKEVEQRRAGGYSRKYASKAKNLADDMVRNTARDLLYYAVTQDAMLIFENLSRGFGRQGKRTFMAERQYTRMEDWLTAKLAYEGLPSKTYLSKTLAQYTSKTCSNCGFTITSADYDRVLEKLKKTATGWMTTINGKELKVEGQITYYNRYKRQNVVKDLSVELDRLSEESVNNDISSWTKGRSGEALSLLKKRFSHRPVQEKFVCLNCEFETHADEQAALNIARSWLFLRSQEYKKYQTNKTTGNTDKRAFVETWQSFYRKKLKEVWKPAV

SEQ ID NO: 49514 - protein, 978 aa, synthetic construct
  REGION 1..978: note = engineered CasX variant
QEIKRINKIRRRLVKDSNTKKAGKTGPMKTLLVRVMTPDLRERLENLRKKPENIPQPISNTSRANLNKLLTDYTEMKKAILHVYWEEFQKDPVGLMSRVAQPASKKIDQNKLKPEMDEKGNLTTAGFACSQCGQPLFVYKLEQVSEKGKAYTNYFGRCNVAEHEKLILLAQLKPEKDSDEAVTYSLGKFGQRALDFYSIHVTKESTHPVKPLAQIAGNRYASGPVGKALRDACMGTIASFLSKYQDIIIEHQKVVKGNQKRLESLRELAGKENLEYPSVTLPPQPHTKEGVDAYNEVIARVRMWVNLNLWQKLKLSRDDAKPLLRLKGFPSFPLVERQANEVDWWDMVCNVKKLINEKKEDGKVFWQNLAGYKRQEALRPYLSSEEDRKKGKKFARYQLGDLLLHLEKKHGEDWGKVYDEAWERIDKKVEGLSKHIKLEEERRSEDAQSKAALTDWLRAKASFVIEGSKEADKDEFCRCELKLQKWYGDLRGKPFAIEAENSILDISGFSKQYNCAFIWQKDGVKKLNLYLIINYFKGGKLRFKKIKPEAFEANRFYTVINKKSGEIVPMEVNFNFDDPNLIILPLAFGKRQGREFIWNDLLSLETGSLKLANGRVIEKTLYNRRTRQDEPALFVALTFERREVLDSSNIKPMNLIGVDRGENIPAVIALTDPEGCPLSRFKDSLGNPTHILRIGESYKEKQRTIQAKKEVEQRRAGGYSRKYASKAKNLADDMVRNTARDLLYYAVTQDAMLIFENLSRGFGRQGKRTFMAERQYTRMEDWLTAKLAYEGLPSKTYLSKTLAQYTSKTCSNCGFTITSADYDRVLEKLKKTATGWMTTINGKELKVEGQITYYNRYKRQNVVKDLSVELDRLSEESVNNDISSWTKGRSGEALSLLKKRFSHRPVQEKFVCLNCEFETHADEQAALNIARSWLFLRSQEYKKYQTNKTTGNTDKRAFVETWQSFYRKKLKEVWKPAV

SEQ ID NO: 49515 - protein, 979 aa, synthetic construct
  REGION 1..979: note = engineered CasX variant
QEIKRINKIRRRLVKDSNTKKAGKTGPMKTLLVRVMTPDLRERLENLRKKPENIPQPISNTSRANLNKLLTDYTEMKKAILHVYWEEFQKDPVGLMSRVAQPASKKIDQNKLKPEMDEKGNLTTAGFACSQCGQPLFVYKLEQVSEKGKAYTNYFGRCNVAEHEKLILLAQLKPEKDSDEAVTYSLGKFGQRALDFYSIHVTKESTHPVKPLAQIAGNRYASGPVGKALRDACMGTIASFLSKYQDIIIEHQKVVKGNQKRLESLRELAGKENLEYPSVTLPPQPHTKEGVDAYNEVIARVRMWVNLNLWQKLKLSRDDAKPLLRLKGFPSFPLVERQANEVDWWDMVCNVKKLINEKKEDGKVFWQNLAGYKRQEALRPYLSSEEDRKKGKKFARYQLGDLLLHLEKKHGEDWGKVYDEAWERIDKKVEGLSKHIKLEEERRSEDAQSKAALTDWLRAKASFVIEGLKEADDKDEFCRCELKLQKWYGDLRGKPFAIEAENSILDISGFSKQYNCAFIWQKDGVKKLNLYLIINYFKGGKLRFKKIKPEAFEANRFYTVINKKSGEIVPMEVNFNFDDPNLIILPLAFGKRQGREFIWNDLLSLETGSLKLANGRVIEKTLYNRRTRQDEPALFVALTFERREVLDSSNIKPMNLIGVDRGENIPAVIALTDPEGCPLSRFKDSLGNPTHILRIGESYKEKQRTIQAKKEVEQRRAGGYSRKYASKAKNLADDMVRNTARDLLYYAVTQDAMLIFENLSRGFGRQGKRTFMAERQYTRMEDWLTAKLAYEGLPSKTYLSKTLAQYTSKTCSNCGFTITSADYDRVLEKLKKTATGWMTTINGKELKVEGQITYYNRYKRQNVVKDLSVELDRLSEESVNNDISSWTKGRSGEALSLLKKRFSHRPVQEKFVCLNCEFETHADEQAALNIARSWLFLRSQEYKKYQTNKTTGNTDKRAFVETWQSFYRKKLKEVWKPAV

SEQ ID NO: 49516 - protein, 979 aa, synthetic construct
  REGION 1..979: note = engineered CasX variant
QEIKRINKIRRRLVKDSNTKKAGKTGPMKTLLVRVMTPDLRERLENLRKKPENIPQPISNTSRANLNKLLTDYTEMKKAILHVYWEEFQKDPVGLMSRVAQPASKKIDQNKLKPEMDEKGNLTTAGFACSQCGQPLFVYKLEQVSEKGKAYTNYFGRCNVAEHEKLILLAQLKPEKDSDEAVTYSLGKFGQRALDFYSIHVTKESTHPVKPLAQIAGNRYASGPVGKALRDACMGTIASFLSKYQDIIIEHQKVVKGNQKRLESLRELAGKENLEYPSVTLPPQPHTKEGVDAYNEVIARVRMWVNLNLWQKLKLSRDDAKPLLRLKGFPSFPLVERQANEVDWWDMVCNVKKLINEKKEDGKVFWQNLAGYKRQEALRPYLSSEEDRKKGKKFARYQLGDLLLHLEKKHGEDWGKVYDEAWERIDKKVEGLSKHIKLEEERRSEDAQSKAALTDWLRAKASFVIEGLKEADKDEFCRCELKLQKWYGDLRGKPFAIEAENSILDISGFSKQYNCAFIWQKDGVKKLNLYLIINYFKGGKLRFKKIKPEAFEANRFYTVINKKSGEIVPMEVNFNFDDPNLIILPLAFGKRQGREFIWNDLLSLETGSLKLANGRVIEKTLYNRRTRQDEPALFVALTFERREVLDSSNIKPMNLIGVDRGENIPAVIALTDPEGCPLSRFKDSLGNPTHILRIGESYKEKQRTIQAKKEVEQRRAGGYSRKYASKAKNLADDMVRNTARDLLYYAVTQDAMLIFENLSRGFGRQGKRTFMAERQYTRMEDWLTAKLAYEGLPSKTYLSKTLAQYTSKTCSNCGFTITSADYDRVLEKLKKTATGWMTTINGKELKVEGQITYYNRYKRQNVVKDLSVELDRLSEESVNNDISSWTKGRSGNEALSLLKKRFSHRPVQEKFVCLNCEFETHADEQAALNIARSWLFLRSQEYKKYQTNKTTGNTDKRAFVETWQSFYRKKLKEVWKPAV

SEQ ID NO: 49517 - protein, 978 aa, synthetic construct
  REGION 1..978: note = engineered CasX variant
QEIKRINKIRRRLVKDSNTKKAGKTGPMKTLLVRVMTPDLRERLENLRKKPENIPQPISNTSRANLNKLLTDYTEMKKAILHVYWEEFQKDPVGLMSRVAQPASKKIDQNKLKPEMDEKGNLTTAGFACSQCGQPLFVYKLEQVSEKGKAYTNYFGRCNVAEHEKLILLAQLKPEKDSDEAVTYSLGKFGQRALDFYSIHVTKESTHPVKPLAQIAGNRYASGPVGKALRDACMGTIASFLSKYQDIIIEHQKVVKGNQKRLESLRELAGKENLEYPSVTLPPQPHTKEGVDAYNEVIARVRMWVNLNLWQKLKLSRDDAKPLLRLKGFPSFPLVERQANEVDWWDMVCNVKKLINEKKEDGKVFWQNLAGYKRQEALRPYLSSEEDRQKGKKFARYQLGDLLLHLEKKHGEDWGKVYDEAWERIDKKVEGLSKHIKLEEERRSEDAQSKAALTDWLRAKASFVIEGLKEADKDEFCRCELKLQKWYGDLRGKPFAIEAENSILDISGFSKQYNCAFIWQKDGVKKLNLYLIINYFKGGKLRFKKIKPEAFEANRFYTVINKKSGEIVPMEVNFNFDDPNLIILPLAFGKRQGREFIWNDLLSLETGSLKLANGRVIEKTLYNRRTRQDEPALFVALTFERREVLDSSNIKPMNLIGVDRGENIPAVIALTDPEGCPLSRFKDSLGNPTHILRIGESYKEKQRTIQAKKEVEQRRAGGYSRKYASKAKNLADDMVRNTARDLLYYAVTQDAMLIFENLSRGFGRQGKRTFMAERQYTRMEDWLTAKLAYEGLPSKTYLSKTLAQYTSKTCSNCGFTITSADYDRVLEKLKKTATGWMTTINGKELKVEGQITYYNRYKRQNVVKDLSVELDRLSEESVNNDISSWTKGRSGEALSLLKKRFSHRPVQEKFVCLNCEFETHADEQAALNIARSWLFLRSQEYKKYQTNKTTGNTDKRAFVETWQSFYRKKLKEVWKPAV

SEQ ID NO: 49518 - protein, 978 aa, synthetic construct
  REGION 1..978: note = engineered CasX variant
QEIKRINKIRRRLVKDSNTKKAGKTGPMKTLLVRVMTPDLRERLENLRKKPENIPQPISNTSRANLNKLLTDYTEMKKAILHVYWEEFQKDPVGLMSRVAQPASKKIDQNKLKPEMDEKGNLTTAGFACSQCGQPLFVYKLEQVSEKGKAYTNYFGRCNVAEHEKLILLAQLKPEKDSDEAVTYSLGKFGQRALDFYSIHVTKESTHPVKPLAQIAGNRYASGPVGKALRDACMGTIASFLSKYQDIIIEHQKVVKGNQKRLESLRELAGKENLEYPSVTLPPQPHTKEGVDAYNEVIARVRMWVNLNLWQKLKLSRDDAKPLLRLKGFPSFPLVERQANEVDWWDMVCNVKKLINEKKEDGKVFWQNLAGYKRQEALRPYLSSEEDRKKGKKFARYQLGDLLLHLEKKHGEDWGKVYDEAWERIDKKVEGLSKHIKLEEERRSEDAQSKAALTDWLRAKASFVIEGLKEADKDEFCRCELKLQKWYGDLRGKPFAIEAENSILDISGFSKQYNCAFIWQKDGVKKLNLYLIINYFKGGKLRFKKIKPEAFEANRFYTVINKKSGEIVPMEVNFNFDDPNLIILPLAFGKRQGREFIWNDLLSLETGSLKLANGRVIEKTLYNRRTRQDEPALFVALTFERREVLDSSNIKPMNLIGVDRGENIPAVIALTDPEGCPLSRFKDSLGNPTHILRIGESYKEKQRTIQAKKEVEQRRAGGYSRKYASKAKNLADDMVRNTARDLLYYAVTQDAMLIFENLSRGFGRQGKRTFMAERQYTRMEDWLTAKLAYEGLPSQTYLSKTLAQYTSKTCSNCGFTITSADYDRVLEKLKKTATGWMTTINGKELKVEGQITYYNRYKRQNVVKDLSVELDRLSEESVNNDISSWTKGRSGEALSLLKKRFSHRPVQEKFVCLNCEFETHADEQAALNIARSWLFLRSQEYKKYQTNKTTGNTDKRAFVETWQSFYRKKLKEVWKPAV

SEQ ID NO: 49519 - protein, 978 aa, synthetic construct
  REGION 1..978: note = engineered CasX variant
QEIKRINKIRRRLVKDSNTKKAGKTGPMKTLLVRVMTPDLRERLENLRKKPENIPQPISNTSRANLNKLLTDYTEMKKAILHVYWEEFQKDPVGLMSRVAQPASKKIDQNKLKPEMDEKGNLTTAGFACSQCGQPLFVYKLEQVSEKGKAYTNYFGRCNVAEHEKLILLAQLKPEKDSDEAVTYSLGKFGQRALDFYSIHVTKESTHPVKPLAQIAGNRYASGPVGKALRDACMGTIASFLSKYQDIIIEHQKVVKGNQKRLESLRELAGKENLEYPSVTLPPQPHTKEGVDAYNEVIARVRMWVNLNLWQKLKLSRDDAKPLLRLKGFPSFPLVERQANEVDWWDMVCNVKKLINEKKEDGKVFWQNLAGYKRQEALRPYLSSEEDRKKGKKFARYQLGDLLLHLEKKHGEDWGKVYDEAWERIDKKVEGLSKHIKLEEERRSEDAQSKAALTDWLRAKASFVIEGLKEADKDEFCRCELKLQKWYGDLRGKPFAIEAENSILDISGFSKQYNCAFIWQKDGVKKLNLYLIINYFKGGKLRFKKIKPEAFEANRFYTVINKKSGEIVPMEVNFNFDDPNLIILPLAFGKRQGREFIWNDLLSLETGSLKLANGRVIEKTLYNRRTRQDEPALFVALTFERREVLDSSNIKPMNLIGVDRGENIPAVIALTDPEGCPLSRFKDSLGNPTHILRIGESYKEKQRTIQAKKEVEQRRAGGYSRKYASKAKNLADDMVRNTARDLLYYAVTQDAMLIFENLSRGFGRQGKRTFMAERQYTRMEDWLTAKLAYNGLPSKTYLSKTLAQYTSKTCSNCGFTITSADYDRVLEKLKKTATGWMTTINGKELKVEGQITYYNRYKRQNVVKDLSVELDRLSEESVNNDISSWTKGRSGEALSLLKKRFSHRPVQEKFVCLNCEFETHADEQAALNIARSWLFLRSQEYKKYQTNKTTGNTDKRAFVETWQSFYRKKLKEVWKPAV

SEQ ID NO: 49520 - protein, 978 aa, synthetic construct
  REGION 1..978: note = engineered CasX variant
QEIKRINKIRRRLVKDSNTKKAGKTGPMKTLLVRVMTPDLRERLENLRKKPENIPQPISNTSRANLNKLLTDYTEMKKAILHVYWEEFQKDPVGLMSRVAQPASKKIDQNKLKPEMDEKGNLTTAGFACSQCGQPLFVYKLEQVSEKGKAYTNYFGRCNVAEHEKLIQLAQLKPEKDSDEAVTYSLGKFGQRALDFYSIHVTKESTHPVKPLAQIAGNRYASGPVGKALRDACMGTIASFLSKYQDIIIEHQKVVKGNQKRLESLRELAGKENLEYPSVTLPPQPHTKEGVDAYNEVIARVRMWVNLNLWQKLKLSRDDAKPLLRLKGFPSFPLVERQANEVDWWDMVCNVKKLINEKKEDGKVFWQNLAGYKRQEALRPYLSSEEDRKKGKKFARYQLGDLLLHLEKKHGEDWGKVYDEAWERIDKKVEGLSKHIKLEEERRSEDAQSKAALTDWLRAKASFVIEGLKEADKDEFCRCELKLQKWYGDLRGKPFAIEAENSILDISGFSKQYNCAFIWQKDGVKKLNLYLIINYFKGGKLRFKKIKPEAFEANRFYTVINKKSGEIVPMEVNFNFDDPNLIILPLAFGKRQGREFIWNDLLSLETGSLKLANGRVIEKTLYNRRTRQDEPALFVALTFERREVLDSSNIKPMNLIGVDRGENIPAVIALTDPEGCPLSRFKDSLGNPTHILRIGESYKEKQRTIQAKKEVEQRRAGGYSRKYASKAKNLADDMVRNTARDLLYYAVTQDAMLIFENLSRGFGRQGKRTFMAERQYTRMEDWLTAKLAYEGLPSKTYLSKTLAQYTSKTCSNCGFTITSADYDRVLEKLKKTATGWMTTINGKELKVEGQITYYNRYKRQNVVKDLSVELDRLSEESVNNDISSWTKGRSGEALSLLKKRFSHRPVQEKFVCLNCEFETHADEQAALNIARSWLFLRSQEYKKYQTNKTTGNTDKRAFVETWQSFYRKKLKEVWKPAV

SEQ ID NO: 49521 - protein, 978 aa, synthetic construct
  REGION 1..978: note = engineered CasX variant
QEIKRINKIRRRLVKDSNTKKAGKTGPMKTLLVRVMTPDLRERLENLRKKPENIPQPISNTSRANLNKLLTDYTEMKKAILHVYWEEFQKDPVGLMSRVAQPASKKIDQNKLKPEMDEKGNLTTAGFACSQCGQPLFVYKLEQVSEKGKAYTNYFGRCNVAEHEKLILLAQLKPEKDSDEAVTYSLGKFGQRALDFYSIHVTKESTHPVKPLAQIAGNRYASGPVGKALRDACMGTIASFLSKYQDIIIEHQKVVKGNQKRLESLRELAGKENLEYPSVTLPPQPHTKEGVDAYNEVIARVRMWVNLNLWQKLKLSRDDAKPLLRLKGFPSFPLVERQANEVDWWDMVCNVKKLINEKKEDGKVFWQNLAIYKRQEALRPYLSSEEDRKKGKKFARYQLGDLLLHLEKKHGEDWGKVYDEAWERIDKKVEGLSKHIKLEEERRSEDAQSKAALTDWLRAKASFVIEGLKEADKDEFCRCELKLQKWYGDLRGKPFAIEAENSILDISGFSKQYNCAFIWQKDGVKKLNLYLIINYFKGGKLRFKKIKPEAFEANRFYTVINKKSGEIVPMEVNFNFDDPNLIILPLAFGKRQGREFIWNDLLSLETGSLKLANGRVIEKTLYNRRTRQDEPALFVALTFERREVLDSSNIKPMNLIGVDRGENIPAVIALTDPEGCPLSRFKDSLGNPTHILRIGESYKEKQRTIQAKKEVEQRRAGGYSRKYASKAKNLADDMVRNTARDLLYYAVTQDAMLIFENLSRGFGRQGKRTFMAERQYTRMEDWLTAKLAYEGLPSKTYLSKTLAQYTSKTCSNCGFTITSADYDRVLEKLKKTATGWMTTINGKELKVEGQITYYNRYKRQNVVKDLSVELDRLSEESVNNDISSWTKGRSGEALSLLKKRFSHRPVQEKFVCLNCEFETHADEQAALNIARSWLFLRSQEYKKYQTNKTTGNTDKRAFVETWQSFYRKKLKEVWKPAV

SEQ ID NO: 49522 - protein, 978 aa, synthetic construct
  REGION 1..978: note = engineered CasX variant
QEIKRINKIRRRLVKDSNTKKAGKTGPMKTLLVRVMTPDLRERLENLRKKPENIPQPISNTSRANLNKLLTDYTEMKKAILHVYWEEFQKDPVGLMSRVAQPASKKIDQNKLKPEMDEKGNLTTAGFACSQCGQPLFVYKLEQVSEKGKAYTNYFGRCNVAEHEKLILLAQLKPEKDSDEAVTYSLGKFGQRALDFYSIHVTKESTHPVKPLAQIAGNRYASGPVGKALRDACMGTIASFLSKYQDIIIEHQKVVKGNQKRLESLRELAGKENLEYPSVTLPPQPHTKEGVDAYNEVIARVRMWVNLNLWQKLKLSRDDAKPLLRLKGFPSFPLVERQANEVDWWDMVCNVKKLINEKKEDGKVFWQNLAGYKRQEALRPYLSSEEDREKGKKFARYQLGDLLLHLEKKHGEDWGKVYDEAWERIDKKVEGLSKHIKLEEERRSEDAQSKAALTDWLRAKASFVIEGLKEADKDEFCRCELKLQKWYGDLRGKPFAIEAENSILDISGFSKQYNCAFIWQKDGVKKLNLYLIINYFKGGKLRFKKIKPEAFEANRFYTVINKKSGEIVPMEVNFNFDDPNLIILPLAFGKRQGREFIWNDLLSLETGSLKLANGRVIEKTLYNRRTRQDEPALFVALTFERREVLDSSNIKPMNLIGVDRGENIPAVIALTDPEGCPLSRFKDSLGNPTHILRIGESYKEKQRTIQAKKEVEQRRAGGYSRKYASKAKNLADDMVRNTARDLLYYAVTQDAMLIFENLSRGFGRQGKRTFMAERQYTRMEDWLTAKLAYEGLPSKTYLSKTLAQYTSKTCSNCGFTITSADYDRVLEKLKKTATGWMTTINGKELKVEGQITYYNRYKRQNVVKDLSVELDRLSEESVNNDISSWTKGRSGEALSLLKKRFSHRPVQEKFVCLNCEFETHADEQAALNIARSWLFLRSQEYKKYQTNKTTGNTDKRAFVETWQSFYRKKLKEVWKPAV

SEQ ID NO: 49523 - protein, 978 aa, synthetic construct
  REGION 1..978: note = engineered CasX variant
QEIKRINKIRRRLVKDSNTKKAGKTGPMKTLLVRVMTPDLRERLENLRKKPENIPQPISNTSRANLNKLLTDYTEMKKAILHVYWEEFQKDPVGLMSRVAQPASKKIDQNKLKPEMDEKGNLTTAGFACSQCGQPLFVYKLEQVSEKGKAYTNYFGRCNVAEHEKLILLAQLKPEKDSDEAVTYSLGKFGQRALDFYSIHVTKESTHPVKPLAQIAGNRYASGPVGKALRDACMGTIASFLSKYQDIIIEHQKVVKGNQKRLESLRELAGKENLEYPSVTLPPQPHTKEGVDAYNEVIARVRMWVNLNLWQKLKLSRDDAKPLLRLKGFPSFPLVERQANEVDWWDMVCNVKKLINEKKEDGKVFWQNLAGYKRQEALRPYLSSEEDRKKGKKFARYQLGDLLLHLEKKHGEDWGKVYDEAWERIDKKVEGLSKHIKLEEERRSEDAQSKAALTDWLRAKASFVIEGLKEADKDEFCRCELKLQKWYGDLRGKPFAIEAENSILDISGFSKQYNCAFIWQKDGVKKLNLYLIINYFKGGKLRFKKIKPEAFEANRFYTVINKKSGEIVIMEVNFNFDDPNLIILPLAFGKRQGREFIWNDLLSLETGSLKLANGRVIEKTLYNRRTRQDEPALFVALTFERREVLDSSNIKPMNLIGVDRGENIPAVIALTDPEGCPLSRFKDSLGNPTHILRIGESYKEKQRTIQAKKEVEQRRAGGYSRKYASKAKNLADDMVRNTARDLLYYAVTQDAMLIFENLSRGFGRQGKRTFMAERQYTRMEDWLTAKLAYEGLPSKTYLSKTLAQYTSKTCSNCGFTITSADYDRVLEKLKKTATGWMTTINGKELKVEGQITYYNRYKRQNVVKDLSVELDRLSEESVNNDISSWTKGRSGEALSLLKKRFSHRPVQEKFVCLNCEFETHADEQAALNIARSWLFLRSQEYKKYQTNKTTGNTDKRAFVETWQSFYRKKLKEVWKPAV

SEQ ID NO: 49524 - protein, 979 aa, synthetic construct
  REGION 1..979: note = engineered CasX variant
QEIKRINKIRRRLVKDSNTKKAGKTGPMKTLLVRVMTPDLRERLENLRKKPENIPQPISNTSRANLNKLLTDYTEMKKAILHVYWEEFQKDPVGLMSRVAQPASKKIDQNKLKPEMDEKGNLTTAGFACSQCGQPLFVYKLEQVSEKGKAYTNYFGRCNVAEHEKLILLAQLKPEKDSDEAVTYSLGKFGQRALDFYSIHVTKESTHPVKPLAQIAGNRYASGPVGKALRGACMGTIASFLSKYQDIIIEHQKVVKGNQKRLESLRELAGKENLEYPSVTLPPQPHTKEGVDAYNEVIARVRMWVNLNLWQKLKLSRDDAKPLLRLKGFPSFPLVERQANEVDWWDMVCNVKKLINEKKEDGKVFWQNLAGYKRQEALRPYLSSEEDRKKGKKFARYQLGDLLLHLEKKHGEDWGKVYDEAWERIDKKVEGLSKHIKLEEERRSEDAQSKAALTDWLRAKASFVIEGLKEADKDEFCRCELKLQKWYGDLRGKPFAIEAENSILDISGFSKQYNCAFIWQKDGVKKLNLYLIINYFKGGKLRFKKIKPEAFEANRFYTVINKKSGEIVPMEVNFNFDDPNLIILPLAFGKRQGREFIWNDLLSLETGSLKLANGRVIEKTLYNRRTRQDEPALFVALTFERREVLDSSNIKPMNLIGVDRGENIPAVIALTDPEGCPLSRFKDSLGNPTHILRIGESYKEKQRTIQAKKEVEQRRAGGYSRKYASKAKNLADDMVRNTARDLLYYAVTQDAMLIFENLSRGFGRQGKRTFMAERQYTRMEDWLTAKLAYEGLPSKTYLSKTLAQYTSKTCSNCGFTITSADYDRVLEKLKKTATGWMTTINGKELKVEGQITYYNRYKRQNVVKDLSVELDRLSEESVNNDISSWTKGRSGEALSLLKKRFSHRPVQEKFVCLNCGFETHADEQAALNIARSWLFLRSQEYKKYQTNKTSTGNTDKRAFVETWQSFYRKKLKEVWKPAV

SEQ ID NO: 49525 - protein, 979 aa, synthetic construct
  REGION 1..979: note = engineered CasX variant
QEIKRINKIRRRLVKDSNTKKAGKTGPMKTLLVRVMTPDLRERLENLRKKPENIPQPISNTSRANLNKLLTDYTEMKKAILHVYWEEFQKDPVGLMSRVAQPASKKIDQNKLKPEMDEKGNLTTAGFACSQCGQPLFVYKLEQVSEKGKAYTNYFGRCNVAEHEKLILLAQLKPEKDSDEAVTYSLGKFGQRALDFYSIHVTKESTHPVKPLAQIAGNRYASGPVGKALRDACMGTIASFLSKYQDIIIEHQKVVKGNQKRLESLRELAGKENLEYPSVTLPPQPHTKEGVDAYNEVIARVRMWVNLNLWQKLKLSRDDAKPLLRLKNFPSFPLVERQANEVDWWDMVCNVKKLINEKKEDGKVFWQNLAGYKRQEALRPYLSSEEDRKKGKKFARYQLGDLLLHLEKKHGEDWGKVYDEAWERIDKKVEGLSKHIKLEEERRSEDAQSKAALTDWLRAKASFVIEGLKEADKDEFCRCELKLQKWYGDLRGKPFAIEAENSILDISGFSKQYNCAFIWQKDGVKKLNLYLIINYFKGGKLRFKKIKPEAFEANRFYTVINKKSGEIVPMEVNFNFDDPNLIILPLAFGKRQGREFIWNDLLSLETGSLKLANGRVIEKTLYNRRTRQDEPALFVALTFERREVLDSSNIKPMNLIGVDRGENIPAVIALTDPEGCPLSRFKDSLGNPTHILRIGESYKEKQRTIQAKKEVEQRRAGGYSRKYASKAKNLADDMVRNTARDLLYYAVTQDAMLIFENLSRGFGRQGKRTFMAERQYTRMEDWLTAKLAYEGLPSKTYLSKTLAQYTSKTCSNCGFTITSADYDRVLEKLKKTATGWMTTINGKELKVEGQITYYNRYKRQNVVKDLSVELDRLSEESVNNDISSWTKGRSGEALSLLKKRFSHRPVQEKFVCLNCGFETHADEQAALNIARSWLFLRSQEYKKYQTNKTSTGNTDKRAFVETWQSFYRKKLKEVWKPAV

SEQ ID NO: 49526 - protein, 979 aa, synthetic construct
  REGION 1..979: note = engineered CasX variant
QEIKRINKIRRRLVKDSNTKKAGKTGPMKTLLVRVMTPDLRERLENLRKKPENIPQPISNTSRANLNKLLTDYTEMKKAILHVYWEEFQKDPVGLMSRVAQPASKKIDQNKLKPEMDEKGNLTTAGFACSQCGQPLFVYKLEQVSEKGKAYTNYFGRCNVAEHEKLILLAQLKPEKDSDEAVTYSLGKFGQRALDFYSIHVTKESTHPVKPLAQIAGNRYASGPVGKALRDACMGTIASFLSKYQDIIIEHQKVVKGNQKRLESLRELAGKENLEYPSVTLPPQPHTKEGVDAYNEVIARVRMWVNLNLWQKLKLSRDDAKPLLRLKGFPSFPLVERQANEVDWWDMVCNVKKLINEKKEDGKVFWQNLAGYKRQEALRPYLSSEEDRKKGKKFARYQLGDLLNHLEKKHGEDWGKVYDEAWERIDKKVEGLSKHIKLEEERRSEDAQSKAALTDWLRAKASFVIEGLKEADKDEFCRCELKLQKWYGDLRGKPFAIEAENSILDISGFSKQYNCAFIWQKDGVKKLNLYLIINYFKGGKLRFKKIKPEAFEANRFYTVINKKSGEIVPMEVNFNFDDPNLIILPLAFGKRQGREFIWNDLLSLETGSLKLANGRVIEKTLYNRRTRQDEPALFVALTFERREVLDSSNIKPMNLIGVDRGENIPAVIALTDPEGCPLSRFKDSLGNPTHILRIGESYKEKQRTIQAKKEVEQRRAGGYSRKYASKAKNLADDMVRNTARDLLYYAVTQDAMLIFENLSRGFGRQGKRTFMAERQYTRMEDWLTAKLAYEGLPSKTYLSKTLAQYTSKTCSNCGFTITSADYDRVLEKLKKTATGWMTTINGKELKVEGQITYYNRYKRQNVVKDLSVELDRLSEESVNNDISSWTKGRSGEALSLLKKRFSHRPVQEKFVCLNCGFETHADEQAALNIARSWLFLRSQEYKKYQTNKTSTGNTDKRAFVETWQSFYRKKLKEVWKPAV

SEQ ID NO: 49527 - protein, 979 aa, synthetic construct
  REGION 1..979: note = engineered CasX variant
QEIKRINKIRRRLVKDSNTKKAGKTGPMKTLLVRVMTPDLRERLENLRKKPENIPQPISNTSRANLNKLLTDYTEMKKAILHVYWEEFQKDPVGLMSRVAQPASKKIDQNKLKPEMDEKGNLTTAGFACSQCGQPLFVYKLEQVSEKGKAYTNYFGRCNVAEHEKLILLAQLKPEKDSDEAVTYSLGKFGQRALDFYSIHVTKESTHPVKPLAQIAGNRYASGPVGKALRDACMGTIASFLSKYQDIIIEHQKVVKGNQKRLESLRELAGKENLEYPSVTLPPQPHTKEGVDAYNEVIARVRMWVNLNLWQKLKLSRDDAKPLLRLKGFPSFPLVERQANEVDWWDMVCNVKKLINEKKEDGKVFWQNLAGYKRQEALRPYLSSEEDRKKGKKFARYQLGDLLWHLEKKHGEDWGKVYDEAWERIDKKVEGLSKHIKLEEERRSEDAQSKAALTDWLRAKASFVIEGLKEADKDEFCRCELKLQKWYGDLRGKPFAIEAENSILDISGFSKQYNCAFIWQKDGVKKLNLYLIINYFKGGKLRFKKIKPEAFEANRFYTVINKKSGEIVPMEVNFNFDDPNLIILPLAFGKRQGREFIWNDLLSLETGSLKLANGRVIEKTLYNRRTRQDEPALFVALTFERREVLDSSNIKPMNLIGVDRGENIPAVIALTDPEGCPLSRFKDSLGNPTHILRIGESYKEKQRTIQAKKEVEQRRAGGYSRKYASKAKNLADDMVRNTARDLLYYAVTQDAMLIFENLSRGFGRQGKRTFMAERQYTRMEDWLTAKLAYEGLPSKTYLSKTLAQYTSKTCSNCGFTITSADYDRVLEKLKKTATGWMTTINGKELKVEGQITYYNRYKRQNVVKDLSVELDRLSEESVNNDISSWTKGRSGEALSLLKKRFSHRPVQEKFVCLNCGFETHADEQAALNIARSWLFLRSQEYKKYQTNKTSTGNTDKRAFVETWQSFYRKKLKEVWKPAV

SEQ ID NO: 49528 - protein, 979 aa, synthetic construct
  REGION 1..979: note = engineered CasX variant
QEIKRINKIRRRLVKDSNTKKAGKTGPMKTLLVRVMTPDLRERLENLRKKPENIPQPISNTSRANLNKLLTDYTEMKKAILHVYWEEFQKDPVGLMSRVAQPASKKIDQNKLKPEMDEKGNLTTAGFACSQCGQPLFVYKLEQVSEKGKAYTNYFGRCNVAEHEKLILLAQLKPEKDSDEAVTYSLGKFGQRALDFYSIHVTKESTHPVKPLAQIAGNRYASGPVGKALRDACMGTIASFLSKYQDIIIEHQKVVKGNQKRLESLRELAGKENLEYPSVTLPPQPHTKEGVDAYNEVIARVRMWVNLNLWQKLKLSRDDAKPLLRLKGFPSFPLVERQANEVDWWDMVCNVKKLINEKKEDGKVFWQNLAGYKRQEALRPYLSSEEDRKKGKKFARYQLGDLLLHLYKKHGEDWGKVYDEAWERIDKKVEGLSKHIKLEEERRSEDAQSKAALTDWLRAKASFVIEGLKEADKDEFCRCELKLQKWYGDLRGKPFAIEAENSILDISGFSKQYNCAFIWQKDGVKKLNLYLIINYFKGGKLRFKKIKPEAFEANRFYTVINKKSGEIVPMEVNFNFDDPNLIILPLAFGKRQGREFIWNDLLSLETGSLKLANGRVIEKTLYNRRTRQDEPALFVALTFERREVLDSSNIKPMNLIGVDRGENIPAVIALTDPEGCPLSRFKDSLGNPTHILRIGESYKEKQRTIQAKKEVEQRRAGGYSRKYASKAKNLADDMVRNTARDLLYYAVTQDAMLIFENLSRGFGRQGKRTFMAERQYTRMEDWLTAKLAYEGLPSKTYLSKTLAQYTSKTCSNCGFTITSADYDRVLEKLKKTATGWMTTINGKELKVEGQITYYNRYKRQNVVKDLSVELDRLSEESVNNDISSWTKGRSGEALSLLKKRFSHRPVQEKFVCLNCGFETHADEQAALNIARSWLFLRSQEYKKYQTNKTSTGNTDKRAFVETWQSFYRKKLKEVWKPAV

SEQ ID NO: 49529 - protein, 979 aa, synthetic construct
  REGION 1..979: note = engineered CasX variant
QEIKRINKIRRRLVKDSNTKKAGKTGPMKTLLVRVMTPDLRERLENLRKKPENIPQPISNTSRANLNKLLTDYTEMKKAILHVYWEEFQKDPVGLMSRVAQPASKKIDQNKLKPEMDEKGNLTTAGFACSQCGQPLFVYKLEQVSEKGKAYTNYFGRCNVAEHEKLILLAQLKPEKDSDEAVTYSLGKFGQRALDFYSIHVTKESTHPVKPLAQIAGNRYASGPVGKALRDACMGTIASFLSKYQDIIIEHQKVVKGNQKRLESLRELAGKENLEYPSVTLPPQPHTKEGVDAYNEVIARVRMWVNLNLWQKLKLSRDDAKPLLRLKGFPSFPLVERQANEVDWWDMVCNVKKLINEKKEDGKVFWQNLAGYKRQEALRPYLSSEEDRKKGKKFARYQLGDLLLHLEKKHPEDWGKVYDEAWERIDKKVEGLSKHIKLEEERRSEDAQSKAALTDWLRAKASFVIEGLKEADKDEFCRCELKLQKWYGDLRGKPFAIEAENSILDISGFSKQYNCAFIWQKDGVKKLNLYLIINYFKGGKLRFKKIKPEAFEANRFYTVINKKSGEIVPMEVNFNFDDPNLIILPLAFGKRQGREFIWNDLLSLETGSLKLANGRVIEKTLYNRRTRQDEPALFVALTFERREVLDSSNIKPMNLIGVDRGENIPAVIALTDPEGCPLSRFKDSLGNPTHILRIGESYKEKQRTIQAKKEVEQRRAGGYSRKYASKAKNLADDMVRNTARDLLYYAVTQDAMLIFENLSRGFGRQGKRTFMAERQYTRMEDWLTAKLAYEGLPSKTYLSKTLAQYTSKTCSNCGFTITSADYDRVLEKLKKTATGWMTTINGKELKVEGQITYYNRYKRQNVVKDLSVELDRLSEESVNNDISSWTKGRSGEALSLLKKRFSHRPVQEKFVCLNCGFETHADEQAALNIARSWLFLRSQEYKKYQTNKTSTGNTDKRAFVETWQSFYRKKLKEVWKPAV

SEQ ID NO: 49530 - protein, 980 aa, synthetic construct
  REGION 1..980: note = engineered CasX variant
QEIKRINKIRRRLVKDSNTKKAGKTGPMKTLLVRVMTPDLRERLENLRKKPENIPQPISNTSRANLNKLLTDYTEMKKAILHVYWEEFQKDPVGLMSRVAQPASKKIDQNKLKPEMDEKGNLTTAGFACSQCGQPLFVYKLEQVSEKGKAYTNYFGRCNVAEHEKLILLAQLKPEKDSDEAVTYSLGKFGQRALDFYSIHVTKESTHPVKPLAQIAGNRYASGPVGKALRDACMGTIASFLSKYQDIIIEHQKVVKGNQKRLESLRELAGKENLEYPSVTLPPQPHTKEGVDAYNEVIARVRMWVNLNLWQKLKLSRDDAKPLLRLKGFPSFPLVERQANEVDWWDMVCNVKKLINEKKEDGKVFWQNLAGYKRQEALRPYLSSEEDRKKGKKFARYQLGDLLLHLEKKHGERDWGKVYDEAWERIDKKVEGLSKHIKLEEERRSEDAQSKAALTDWLRAKASFVIEGLKEADKDEFCRCELKLQKWYGDLRGKPFAIEAENSILDISGFSKQYNCAFIWQKDGVKKLNLYLIINYFKGGKLRFKKIKPEAFEANRFYTVINKKSGEIVPMEVNFNFDDPNLIILPLAFGKRQGREFIWNDLLSLETGSLKLANGRVIEKTLYNRRTRQDEPALFVALTFERREVLDSSNIKPMNLIGVDRGENIPAVIALTDPEGCPLSRFKDSLGNPTHILRIGESYKEKQRTIQAKKEVEQRRAGGYSRKYASKAKNLADDMVRNTARDLLYYAVTQDAMLIFENLSRGFGRQGKRTFMAERQYTRMEDWLTAKLAYEGLPSKTYLSKTLAQYTSKTCSNCGFTITSADYDRVLEKLKKTATGWMTTINGKELKVEGQITYYNRYKRQNVVKDLSVELDRLSEESVNNDISSWTKGRSGEALSLLKKRFSHRPVQEKFVCLNCGFETHADEQAALNIARSWLFLRSQEYKKYQTNKTSTGNTDKRAFVETWQSFYRKKLKEVWKPAV

SEQ ID NO: 49531 - protein, 980 aa, synthetic construct
  REGION 1..980: note = engineered CasX variant
QEIKRINKIRRRLVKDSNTKKAGKTGPMKTLLVRVMTPDLRERLENLRKKPENIPQPISNTSRANLNKLLTDYTEMKKAILHVYWEEFQKDPVGLMSRVAQPASKKIDQNKLKPEMDEKGNLTTAGFACSQCGQPLFVYKLEQVSEKGKAYTNYFGRCNVAEHEKLILLAQLKPEKDSDEAVTYSLGKFGQRALDFYSIHVTKESTHPVKPLAQIAGNRYASGPVGKALRDACMGTIASFLSKYQDIIIEHQKVVKGNQKRLESLRELAGKENLEYPSVTLPPQPHTKEGVDAYNEVIARVRMWVNLNLWQKLKLSRDDAKPLLRLKGFPSFPLVERQANEVDWWDMVCNVKKLINEKKEDGKVFWQNLAGYKRQEALRPYLSSEEDRKKGKKFARYQLGDLLLHLEKKHGEYDWGKVYDEAWERIDKKVEGLSKHIKLEEERRSEDAQSKAALTDWLRAKASFVIEGLKEADKDEFCRCELKLQKWYGDLRGKPFAIEAENSILDISGFSKQYNCAFIWQKDGVKKLNLYLIINYFKGGKLRFKKIKPEAFEANRFYTVINKKSGEIVPMEVNFNFDDPNLIILPLAFGKRQGREFIWNDLLSLETGSLKLANGRVIEKTLYNRRTRQDEPALFVALTFERREVLDSSNIKPMNLIGVDRGENIPAVIALTDPEGCPLSRFKDSLGNPTHILRIGESYKEKQRTIQAKKEVEQRRAGGYSRKYASKAKNLADDMVRNTARDLLYYAVTQDAMLIFENLSRGFGRQGKRTFMAERQYTRMEDWLTAKLAYEGLPSKTYLSKTLAQYTSKTCSNCGFTITSADYDRVLEKLKKTATGWMTTINGKELKVEGQITYYNRYKRQNVVKDLSVELDRLSEESVNNDISSWTKGRSGEALSLLKKRFSHRPVQEKFVCLNCGFETHADEQAALNIARSWLFLRSQEYKKYQTNKTSTGNTDKRAFVETWQSFYRKKLKEVWKPAV

SEQ ID NO: 49532 - protein, 979 aa, synthetic construct
  REGION 1..979: note = engineered CasX variant
QEIKRINKIRRRLVKDSNTKKAGKTGPMKTLLVRVMTPDLRERLENLRKKPENIPQPISNTSRANLNKLLTDYTEMKKAILHVYWEEFQKDPVGLMSRVAQPASKKIDQNKLKPEMDEKGNLTTAGFACSQCGQPLFVYKLEQVSEKGKAYTNYFGRCNVAEHEKLILLAQLKPEKDSDEAVTYSLGKFGQRALDFYSIHVTKESTHPVKPLAQIAGNRYASGPVGKALRDACMGTIASFLSKYQDIIIEHQKVVKGNQKRLESLRELAGKENLEYPSVTLPPQPHTKEGVDAYNEVIARVRMWVNLNLWQKLKLSRDDAKPLLRLKGFPSFPLVERQANEVDWWDMVCNVKKLINEKKEDGKVFWQNLAGYKRQEALRPYLSSEEDRKKGKKFARYQLGDLLLHLEKKHGEDWGDVYDEAWERIDKKVEGLSKHIKLEEERRSEDAQSKAALTDWLRAKASFVIEGLKEADKDEFCRCELKLQKWYGDLRGKPFAIEAENSILDISGFSKQYNCAFIWQKDGVKKLNLYLIINYFKGGKLRFKKIKPEAFEANRFYTVINKKSGEIVPMEVNFNFDDPNLIILPLAFGKRQGREFIWNDLLSLETGSLKLANGRVIEKTLYNRRTRQDEPALFVALTFERREVLDSSNIKPMNLIGVDRGENIPAVIALTDPEGCPLSRFKDSLGNPTHILRIGESYKEKQRTIQAKKEVEQRRAGGYSRKYASKAKNLADDMVRNTARDLLYYAVTQDAMLIFENLSRGFGRQGKRTFMAERQYTRMEDWLTAKLAYEGLPSKTYLSKTLAQYTSKTCSNCGFTITSADYDRVLEKLKKTATGWMTTINGKELKVEGQITYYNRYKRQNVVKDLSVELDRLSEESVNNDISSWTKGRSGEALSLLKKRFSHRPVQEKFVCLNCGFETHADEQAALNIARSWLFLRSQEYKKYQTNKTSTGNTDKRAFVETWQSFYRKKLKEVWKPAV

SEQ ID NO: 49533 - protein, 979 aa, synthetic construct
  REGION 1..979: note = engineered CasX variant
QEIKRINKIRRRLVKDSNTKKAGKTGPMKTLLVRVMTPDLRERLENLRKKPENIPQPISNTSRANLNKLLTDYTEMKKAILHVYWEEFQKDPVGLMSRVAQPASKKIDQNKLKPEMDEKGNLTTAGFACSQCGQPLFVYKLEQVSEKGKAYTNYFGRCNVAEHEKLILLAQLKPEKDSDEAVTYSLGKFGQRALDFYSIHVTKESTHPVKPLAQIAGNRYASGPVGKALRDACMGTIASFLSKYQDIIIEHQKVVKGNQKRLESLRELAGKENLEYPSVTLPPQPHTKEGVDAYNEVIARVRMWVNLNLWQKLKLSRDDAKPLLRLKGFPSFPLVERQANEVDWWDMVCNVKKLINEKKEDGKVFWQNLAGYKRQEALRPYLSSEEDRKKGKKFARYQLGDLLLHLEKKHGEDWGKVYGEAWERIDKKVEGLSKHIKLEEERRSEDAQSKAALTDWLRAKASFVIEGLKEADKDEFCRCELKLQKWYGDLRGKPFAIEAENSILDISGFSKQYNCAFIWQKDGVKKLNLYLIINYFKGGKLRFKKIKPEAFEANRFYTVINKKSGEIVPMEVNFNFDDPNLIILPLAFGKRQGREFIWNDLLSLETGSLKLANGRVIEKTLYNRRTRQDEPALFVALTFERREVLDSSNIKPMNLIGVDRGENIPAVIALTDPEGCPLSRFKDSLGNPTHILRIGESYKEKQRTIQAKKEVEQRRAGGYSRKYASKAKNLADDMVRNTARDLLYYAVTQDAMLIFENLSRGFGRQGKRTFMAERQYTRMEDWLTAKLAYEGLPSKTYLSKTLAQYTSKTCSNCGFTITSADYDRVLEKLKKTATGWMTTINGKELKVEGQITYYNRYKRQNVVKDLSVELDRLSEESVNNDISSWTKGRSGEALSLLKKRFSHRPVQEKFVCLNCGFETHADEQAALNIARSWLFLRSQEYKKYQTNKTSTGNTDKRAFVETWQSFYRKKLKEVWKPAV

SEQ ID NO: 49534 - protein, 979 aa, synthetic construct
  REGION 1..979: note = engineered CasX variant
QEIKRINKIRRRLVKDSNTKKAGKTGPMKTLLVRVMTPDLRERLENLRKKPENIPQPISNTSRANLNKLLTDYTEMKKAILHVYWEEFQKDPVGLMSRVAQPASKKIDQNKLKPEMDEKGNLTTAGFACSQCGQPLFVYKLEQVSEKGKAYTNYFGRCNVAEHEKLILLAQLKPEKDSDEAVTYSLGKFGQRALDFYSIHVTKESTHPVKPLAQIAGNRYASGPVGKALRDACMGTIASFLSKYQDIIIEHQKVVKGNQKRLESLRELAGKENLEYPSVTLPPQPHTKEGVDAYNEVIARVRMWVNLNLWQKLKLSRDDAKPLLRLKGFPSFPLVERQANEVDWWDMVCNVKKLINEKKEDGKVFWQNLAGYKRQEALRPYLSSEEDRKKGKKFARYQLGDLLLHLEKKHGEDWGKVYDEAWERIDKKVEGLSKHIKLEEERRSEDAQSKAALTDWLRAKASFVIEGKKEADKDEFCRCELKLQKWYGDLRGKPFAIEAENSILDISGFSKQYNCAFIWQKDGVKKLNLYLIINYFKGGKLRFKKIKPEAFEANRFYTVINKKSGEIVPMEVNFNFDDPNLIILPLAFGKRQGREFIWNDLLSLETGSLKLANGRVIEKTLYNRRTRQDEPALFVALTFERREVLDSSNIKPMNLIGVDRGENIPAVIALTDPEGCPLSRFKDSLGNPTHILRIGESYKEKQRTIQAKKEVEQRRAGGYSRKYASKAKNLADDMVRNTARDLLYYAVTQDAMLIFENLSRGFGRQGKRTFMAERQYTRMEDWLTAKLAYEGLPSKTYLSKTLAQYTSKTCSNCGFTITSADYDRVLEKLKKTATGWMTTINGKELKVEGQITYYNRYKRQNVVKDLSVELDRLSEESVNNDISSWTKGRSGEALSLLKKRFSHRPVQEKFVCLNCGFETHADEQAALNIARSWLFLRSQEYKKYQTNKTSTGNTDKRAFVETWQSFYRKKLKEVWKPAV

SEQ ID NO: 49535 - protein, 979 aa, synthetic construct
  REGION 1..979: note = engineered CasX variant
QEIKRINKIRRRLVKDSNTKKAGKTGPMKTLLVRVMTPDLRERLENLRKKPENIPQPISNTSRANLNKLLTDYTEMKKAILHVYWEEFQKDPVGLMSRVAQPASKKIDQNKLKPEMDEKGNLTTAGFACSQCGQPLFVYKLEQVSEKGKAYTNYFGRCNVAEHEKLILLAQLKPEKDSDEAVTYSLGKFGQRALDFYSIHVTKESTHPVKPLAQIAGNRYASGPVGKALRDACMGTIASFLSKYQDIIIEHQKVVKGNQKRLESLRELAGKENLEYPSVTLPPQPHTKEGVDAYNEVIARVRMWVNLNLWQKLKLSRDDAKPLLRLKGFPSFPLVERQANEVDWWDMVCNVKKLINEKKEDGKVFWQNLAGYKRQEALRPYLSSEEDRKKGKKFARYQLGDLLLHLEKKHGEDWGKVYDEAWERIDKKVEGLSKHIKLEEERRSEDAQSKAALTDWLRAKASFVIEGSKEADKDEFCRCELKLQKWYGDLRGKPFAIEAENSILDISGFSKQYNCAFIWQKDGVKKLNLYLIINYFKGGKLRFKKIKPEAFEANRFYTVINKKSGEIVPMEVNFNFDDPNLIILPLAFGKRQGREFIWNDLLSLETGSLKLANGRVIEKTLYNRRTRQDEPALFVALTFERREVLDSSNIKPMNLIGVDRGENIPAVIALTDPEGCPLSRFKDSLGNPTHILRIGESYKEKQRTIQAKKEVEQRRAGGYSRKYASKAKNLADDMVRNTARDLLYYAVTQDAMLIFENLSRGFGRQGKRTFMAERQYTRMEDWLTAKLAYEGLPSKTYLSKTLAQYTSKTCSNCGFTITSADYDRVLEKLKKTATGWMTTINGKELKVEGQITYYNRYKRQNVVKDLSVELDRLSEESVNNDISSWTKGRSGEALSLLKKRFSHRPVQEKFVCLNCGFETHADEQAALNIARSWLFLRSQEYKKYQTNKTSTGNTDKRAFVETWQSFYRKKLKEVWKPAV

SEQ ID NO: 49536 - protein, 980 aa, synthetic construct
  REGION 1..980: note = engineered CasX variant
QEIKRINKIRRRLVKDSNTKKAGKTGPMKTLLVRVMTPDLRERLENLRKKPENIPQPISNTSRANLNKLLTDYTEMKKAILHVYWEEFQKDPVGLMSRVAQPASKKIDQNKLKPEMDEKGNLTTAGFACSQCGQPLFVYKLEQVSEKGKAYTNYFGRCNVAEHEKLILLAQLKPEKDSDEAVTYSLGKFGQRALDFYSIHVTKESTHPVKPLAQIAGNRYASGPVGKALRDACMGTIASFLSKYQDIIIEHQKVVKGNQKRLESLRELAGKENLEYPSVTLPPQPHTKEGVDAYNEVIARVRMWVNLNLWQKLKLSRDDAKPLLRLKGFPSFPLVERQANEVDWWDMVCNVKKLINEKKEDGKVFWQNLAGYKRQEALRPYLSSEEDRKKGKKFARYQLGDLLLHLEKKHGEDWGKVYDEAWERIDKKVEGLSKHIKLEEERRSEDAQSKAALTDWLRAKASFVIEGLKEADDKDEFCRCELKLQKWYGDLRGKPFAIEAENSILDISGFSKQYNCAFIWQKDGVKKLNLYLIINYFKGGKLRFKKIKPEAFEANRFYTVINKKSGEIVPMEVNFNFDDPNLIILPLAFGKRQGREFIWNDLLSLETGSLKLANGRVIEKTLYNRRTRQDEPALFVALTFERREVLDSSNIKPMNLIGVDRGENIPAVIALTDPEGCPLSRFKDSLGNPTHILRIGESYKEKQRTIQAKKEVEQRRAGGYSRKYASKAKNLADDMVRNTARDLLYYAVTQDAMLIFENLSRGFGRQGKRTFMAERQYTRMEDWLTAKLAYEGLPSKTYLSKTLAQYTSKTCSNCGFTITSADYDRVLEKLKKTATGWMTTINGKELKVEGQITYYNRYKRQNVVKDLSVELDRLSEESVNNDISSWTKGRSGEALSLLKKRFSHRPVQEKFVCLNCGFETHADEQAALNIARSWLFLRSQEYKKYQTNKTSTGNTDKRAFVETWQSFYRKKLKEVWKPAV

SEQ ID NO: 49537 - protein, 980 aa, synthetic construct
  REGION 1..980: note = engineered CasX variant
QEIKRINKIRRRLVKDSNTKKAGKTGPMKTLLVRVMTPDLRERLENLRKKPENIPQPISNTSRANLNKLLTDYTEMKKAILHVYWEEFQKDPVGLMSRVAQPASKKIDQNKLKPEMDEKGNLTTAGFACSQCGQPLFVYKLEQVSEKGKAYTNYFGRCNVAEHEKLILLAQLKPEKDSDEAVTYSLGKFGQRALDFYSIHVTKESTHPVKPLAQIAGNRYASGPVGKALRDACMGTIASFLSKYQDIIIEHQKVVKGNQKRLESLRELAGKENLEYPSVTLPPQPHTKEGVDAYNEVIARVRMWVNLNLWQKLKLSRDDAKPLLRLKGFPSFPLVERQANEVDWWDMVCNVKKLINEKKEDGKVFWQNLAGYKRQEALRPYLSSEEDRKKGKKFARYQLGDLLLHLEKKHGEDWGKVYDEAWERIDKKVEGLSKHIKLEEERRSEDAQSKAALTDWLRAKASFVIEGLKEADKDEFCRCELKLQKWYGDLRGKPFAIEAENSILDISGFSKQYNCAFIWQKDGVKKLNLYLIINYFKGGKLRFKKIKPEAFEANRFYTVINKKSGEIVPMEVNFNFDDPNLIILPLAFGKRQGREFIWNDLLSLETGSLKLANGRVIEKTLYNRRTRQDEPALFVALTFERREVLDSSNIKPMNLIGVDRGENIPAVIALTDPEGCPLSRFKDSLGNPTHILRIGESYKEKQRTIQAKKEVEQRRAGGYSRKYASKAKNLADDMVRNTARDLLYYAVTQDAMLIFENLSRGFGRQGKRTFMAERQYTRMEDWLTAKLAYEGLPSKTYLSKTLAQYTSKTCSNCGFTITSADYDRVLEKLKKTATGWMTTINGKELKVEGQITYYNRYKRQNVVKDLSVELDRLSEESVNNDISSWTKGRSGNEALSLLKKRFSHRPVQEKFVCLNCGFETHADEQAALNIARSWLFLRSQEYKKYQTNKTSTGNTDKRAFVETWQSFYRKKLKEVWKPAV

SEQ ID NO: 49538 - protein, 979 aa, synthetic construct
  REGION 1..979: note = engineered CasX variant
QEIKRINKIRRRLVKDSNTKKAGKTGPMKTLLVRVMTPDLRERLENLRKKPENIPQPISNTSRANLNKLLTDYTEMKKAILHVYWEEFQKDPVGLMSRVAQPASKKIDQNKLKPEMDEKGNLTTAGFACSQCGQPLFVYKLEQVSEKGKAYTNYFGRCNVAEHEKLILLAQLKPEKDSDEAVTYSLGKFGQRALDFYSIHVTKESTHPVKPLAQIAGNRYASGPVGKALRDACMGTIASFLSKYQDIIIEHQKVVKGNQKRLESLRELAGKENLEYPSVTLPPQPHTKEGVDAYNEVIARVRMWVNLNLWQKLKLSRDDAKPLLRLKGFPSFPLVERQANEVDWWDMVCNVKKLINEKKEDGKVFWQNLAGYKRQEALRPYLSSEEDRQKGKKFARYQLGDLLLHLEKKHGEDWGKVYDEAWERIDKKVEGLSKHIKLEEERRSEDAQSKAALTDWLRAKASFVIEGLKEADKDEFCRCELKLQKWYGDLRGKPFAIEAENSILDISGFSKQYNCAFIWQKDGVKKLNLYLIINYFKGGKLRFKKIKPEAFEANRFYTVINKKSGEIVPMEVNFNFDDPNLIILPLAFGKRQGREFIWNDLLSLETGSLKLANGRVIEKTLYNRRTRQDEPALFVALTFERREVLDSSNIKPMNLIGVDRGENIPAVIALTDPEGCPLSRFKDSLGNPTHILRIGESYKEKQRTIQAKKEVEQRRAGGYSRKYASKAKNLADDMVRNTARDLLYYAVTQDAMLIFENLSRGFGRQGKRTFMAERQYTRMEDWLTAKLAYEGLPSKTYLSKTLAQYTSKTCSNCGFTITSADYDRVLEKLKKTATGWMTTINGKELKVEGQITYYNRYKRQNVVKDLSVELDRLSEESVNNDISSWTKGRSGEALSLLKKRFSHRPVQEKFVCLNCGFETHADEQAALNIARSWLFLRSQEYKKYQTNKTSTGNTDKRAFVETWQSFYRKKLKEVWKPAV

SEQ ID NO: 49539 - protein, 979 aa, synthetic construct
  REGION 1..979: note = engineered CasX variant
QEIKRINKIRRRLVKDSNTKKAGKTGPMKTLLVRVMTPDLRERLENLRKKPENIPQPISNTSRANLNKLLTDYTEMKKAILHVYWEEFQKDPVGLMSRVAQPASKKIDQNKLKPEMDEKGNLTTAGFACSQCGQPLFVYKLEQVSEKGKAYTNYFGRCNVAEHEKLILLAQLKPEKDSDEAVTYSLGKFGQRALDFYSIHVTKESTHPVKPLAQIAGNRYASGPVGKALRDACMGTIASFLSKYQDIIIEHQKVVKGNQKRLESLRELAGKENLEYPSVTLPPQPHTKEGVDAYNEVIARVRMWVNLNLWQKLKLSRDDAKPLLRLKGFPSFPLVERQANEVDWWDMVCNVKKLINEKKEDGKVFWQNLAGYKRQEALRPYLSSEEDRKKGKKFARYQLGDLLLHLEKKHGEDWGKVYDEAWERIDKKVEGLSKHIKLEEERRSEDAQSKAALTDWLRAKASFVIEGLKEADKDEFCRCELKLQKWYGDLRGKPFAIEAENSILDISGFSKQYNCAFIWQKDGVKKLNLYLIINYFKGGKLRFKKIKPEAFEANRFYTVINKKSGEIVPMEVNFNFDDPNLIILPLAFGKRQGREFIWNDLLSLETGSLKLANGRVIEKTLYNRRTRQDEPALFVALTFERREVLDSSNIKPMNLIGVDRGENIPAVIALTDPEGCPLSRFKDSLGNPTHILRIGESYKEKQRTIQAKKEVEQRRAGGYSRKYASKAKNLADDMVRNTARDLLYYAVTQDAMLIFENLSRGFGRQGKRTFMAERQYTRMEDWLTAKLAYEGLPSQTYLSKTLAQYTSKTCSNCGFTITSADYDRVLEKLKKTATGWMTTINGKELKVEGQITYYNRYKRQNVVKDLSVELDRLSEESVNNDISSWTKGRSGEALSLLKKRFSHRPVQEKFVCLNCGFETHADEQAALNIARSWLFLRSQEYKKYQTNKTSTGNTDKRAFVETWQSFYRKKLKEVWKPAV

SEQ ID NO: 49540 - protein, 979 aa, synthetic construct
  REGION 1..979: note = engineered CasX variant
QEIKRINKIRRRLVKDSNTKKAGKTGPMKTLLVRVMTPDLRERLENLRKKPENIPQPISNTSRANLNKLLTDYTEMKKAILHVYWEEFQKDPVGLMSRVAQPASKKIDQNKLKPEMDEKGNLTTAGFACSQCGQPLFVYKLEQVSEKGKAYTNYFGRCNVAEHEKLILLAQLKPEKDSDEAVTYSLGKFGQRALDFYSIHVTKESTHPVKPLAQIAGNRYASGPVGKALRDACMGTIASFLSKYQDIIIEHQKVVKGNQKRLESLRELAGKENLEYPSVTLPPQPHTKEGVDAYNEVIARVRMWVNLNLWQKLKLSRDDAKPLLRLKGFPSFPLVERQANEVDWWDMVCNVKKLINEKKEDGKVFWQNLAGYKRQEALRPYLSSEEDRKKGKKFARYQLGDLLLHLEKKHGEDWGKVYDEAWERIDKKVEGLSKHIKLEEERRSEDAQSKAALTDWLRAKASFVIEGLKEADKDEFCRCELKLQKWYGDLRGKPFAIEAENSILDISGFSKQYNCAFIWQKDGVKKLNLYLIINYFKGGKLRFKKIKPEAFEANRFYTVINKKSGEIVPMEVNFNFDDPNLIILPLAFGKRQGREFIWNDLLSLETGSLKLANGRVIEKTLYNRRTRQDEPALFVALTFERREVLDSSNIKPMNLIGVDRGENIPAVIALTDPEGCPLSRFKDSLGNPTHILRIGESYKEKQRTIQAKKEVEQRRAGGYSRKYASKAKNLADDMVRNTARDLLYYAVTQDAMLIFENLSRGFGRQGKRTFMAERQYTRMEDWLTAKLAYNGLPSKTYLSKTLAQYTSKTCSNCGFTITSADYDRVLEKLKKTATGWMTTINGKELKVEGQITYYNRYKRQNVVKDLSVELDRLSEESVNNDISSWTKGRSGEALSLLKKRFSHRPVQEKFVCLNCGFETHADEQAALNIARSWLFLRSQEYKKYQTNKTSTGNTDKRAFVETWQSFYRKKLKEVWKPAV

SEQ ID NO: 49541 - protein, 979 aa, synthetic construct
  REGION 1..979: note = engineered CasX variant
QEIKRINKIRRRLVKDSNTKKAGKTGPMKTLLVRVMTPDLRERLENLRKKPENIPQPISNTSRANLNKLLTDYTEMKKAILHVYWEEFQKDPVGLMSRVAQPASKKIDQNKLKPEMDEKGNLTTAGFACSQCGQPLFVYKLEQVSEKGKAYTNYFGRCNVAEHEKLIQLAQLKPEKDSDEAVTYSLGKFGQRALDFYSIHVTKESTHPVKPLAQIAGNRYASGPVGKALRDACMGTIASFLSKYQDIIIEHQKVVKGNQKRLESLRELAGKENLEYPSVTLPPQPHTKEGVDAYNEVIARVRMWVNLNLWQKLKLSRDDAKPLLRLKGFPSFPLVERQANEVDWWDMVCNVKKLINEKKEDGKVFWQNLAGYKRQEALRPYLSSEEDRKKGKKFARYQLGDLLLHLEKKHGEDWGKVYDEAWERIDKKVEGLSKHIKLEEERRSEDAQSKAALTDWLRAKASFVIEGLKEADKDEFCRCELKLQKWYGDLRGKPFAIEAENSILDISGFSKQYNCAFIWQKDGVKKLNLYLIINYFKGGKLRFKKIKPEAFEANRFYTVINKKSGEIVPMEVNFNFDDPNLIILPLAFGKRQGREFIWNDLLSLETGSLKLANGRVIEKTLYNRRTRQDEPALFVALTFERREVLDSSNIKPMNLIGVDRGENIPAVIALTDPEGCPLSRFKDSLGNPTHILRIGESYKEKQRTIQAKKEVEQRRAGGYSRKYASKAKNLADDMVRNTARDLLYYAVTQDAMLIFENLSRGFGRQGKRTFMAERQYTRMEDWLTAKLAYEGLPSKTYLSKTLAQYTSKTCSNCGFTITSADYDRVLEKLKKTATGWMTTINGKELKVEGQITYYNRYKRQNVVKDLSVELDRLSEESVNNDISSWTKGRSGEALSLLKKRFSHRPVQEKFVCLNCGFETHADEQAALNIARSWLFLRSQEYKKYQTNKTSTGNTDKRAFVETWQSFYRKKLKEVWKPAV

SEQ ID NO: 49542 - protein, 979 aa, synthetic construct
  REGION 1..979: note = engineered CasX variant
QEIKRINKIRRRLVKDSNTKKAGKTGPMKTLLVRVMTPDLRERLENLRKKPENIPQPISNTSRANLNKLLTDYTEMKKAILHVYWEEFQKDPVGLMSRVAQPASKKIDQNKLKPEMDEKGNLTTAGFACSQCGQPLFVYKLEQVSEKGKAYTNYFGRCNVAEHEKLILLAQLKPEKDSDEAVTYSLGKFGQRALDFYSIHVTKESTHPVKPLAQIAGNRYASGPVGKALRDACMGTIASFLSKYQDIIIEHQKVVKGNQKRLESLRELAGKENLEYPSVTLPPQPHTKEGVDAYNEVIARVRMWVNLNLWQKLKLSRDDAKPLLRLKGFPSFPLVERQANEVDWWDMVCNVKKLINEKKEDGKVFWQNLAIYKRQEALRPYLSSEEDRKKGKKFARYQLGDLLLHLEKKHGEDWGKVYDEAWERIDKKVEGLSKHIKLEEERRSEDAQSKAALTDWLRAKASFVIEGLKEADKDEFCRCELKLQKWYGDLRGKPFAIEAENSILDISGFSKQYNCAFIWQKDGVKKLNLYLIINYFKGGKLRFKKIKPEAFEANRFYTVINKKSGEIVPMEVNFNFDDPNLIILPLAFGKRQGREFIWNDLLSLETGSLKLANGRVIEKTLYNRRTRQDEPALFVALTFERREVLDSSNIKPMNLIGVDRGENIPAVIALTDPEGCPLSRFKDSLGNPTHILRIGESYKEKQRTIQAKKEVEQRRAGGYSRKYASKAKNLADDMVRNTARDLLYYAVTQDAMLIFENLSRGFGRQGKRTFMAERQYTRMEDWLTAKLAYEGLPSKTYLSKTLAQYTSKTCSNCGFTITSADYDRVLEKLKKTATGWMTTINGKELKVEGQITYYNRYKRQNVVKDLSVELDRLSEESVNNDISSWTKGRSGEALSLLKKRFSHRPVQEKFVCLNCGFETHADEQAALNIARSWLFLRSQEYKKYQTNKTSTGNTDKRAFVETWQSFYRKKLKEVWKPAV

SEQ ID NO: 49543 - protein, 979 aa, synthetic construct
  REGION 1..979: note = engineered CasX variant
QEIKRINKIRRRLVKDSNTKKAGKTGPMKTLLVRVMTPDLRERLENLRKKPENIPQPISNTSRANLNKLLTDYTEMKKAILHVYWEEFQKDPVGLMSRVAQPASKKIDQNKLKPEMDEKGNLTTAGFACSQCGQPLFVYKLEQVSEKGKAYTNYFGRCNVAEHEKLILLAQLKPEKDSDEAVTYSLGKFGQRALDFYSIHVTKESTHPVKPLAQIAGNRYASGPVGKALRDACMGTIASFLSKYQDIIIEHQKVVKGNQKRLESLRELAGKENLEYPSVTLPPQPHTKEGVDAYNEVIARVRMWVNLNLWQKLKLSRDDAKPLLRLKGFPSFPLVERQANEVDWWDMVCNVKKLINEKKEDGKVFWQNLAGYKRQEALRPYLSSEEDREKGKKFARYQLGDLLLHLEKKHGEDWGKVYDEAWERIDKKVEGLSKHIKLEEERRSEDAQSKAALTDWLRAKASFVIEGLKEADKDEFCRCELKLQKWYGDLRGKPFAIEAENSILDISGFSKQYNCAFIWQKDGVKKLNLYLIINYFKGGKLRFKKIKPEAFEANRFYTVINKKSGEIVPMEVNFNFDDPNLIILPLAFGKRQGREFIWNDLLSLETGSLKLANGRVIEKTLYNRRTRQDEPALFVALTFERREVLDSSNIKPMNLIGVDRGENIPAVIALTDPEGCPLSRFKDSLGNPTHILRIGESYKEKQRTIQAKKEVEQRRAGGYSRKYASKAKNLADDMVRNTARDLLYYAVTQDAMLIFENLSRGFGRQGKRTFMAERQYTRMEDWLTAKLAYEGLPSKTYLSKTLAQYTSKTCSNCGFTITSADYDRVLEKLKKTATGWMTTINGKELKVEGQITYYNRYKRQNVVKDLSVELDRLSEESVNNDISSWTKGRSGEALSLLKKRFSHRPVQEKFVCLNCGFETHADEQAALNIARSWLFLRSQEYKKYQTNKTSTGNTDKRAFVETWQSFYRKKLKEVWKPAV

SEQ ID NO: 49544 - protein, 979 aa, synthetic construct
  REGION 1..979: note = engineered CasX variant
QEIKRINKIRRRLVKDSNTKKAGKTGPMKTLLVRVMTPDLRERLENLRKKPENIPQPISNTSRANLNKLLTDYTEMKKAILHVYWEEFQKDPVGLMSRVAQPASKKIDQNKLKPEMDEKGNLTTAGFACSQCGQPLFVYKLEQVSEKGKAYTNYFGRCNVAEHEKLILLAQLKPEKDSDEAVTYSLGKFGQRALDFYSIHVTKESTHPVKPLAQIAGNRYASGPVGKALRDACMGTIASFLSKYQDIIIEHQKVVKGNQKRLESLRELAGKENLEYPSVTLPPQPHTKEGVDAYNEVIARVRMWVNLNLWQKLKLSRDDAKPLLRLKGFPSFPLVERQANEVDWWDMVCNVKKLINEKKEDGKVFWQNLAGYKRQEALRPYLSSEEDRKKGKKFARYQLGDLLLHLEKKHGEDWGKVYDEAWERIDKKVEGLSKHIKLEEERRSEDAQSKAALTDWLRAKASFVIEGLKEADKDEFCRCELKLQKWYGDLRGKPFAIEAENSILDISGFSKQYNCAFIWQKDGVKKLNLYLIINYFKGGKLRFKKIKPEAFEANRFYTVINKKSGEIVIMEVNFNFDDPNLIILPLAFGKRQGREFIWNDLLSLETGSLKLANGRVIEKTLYNRRTRQDEPALFVALTFERREVLDSSNIKPMNLIGVDRGENIPAVIALTDPEGCPLSRFKDSLGNPTHILRIGESYKEKQRTIQAKKEVEQRRAGGYSRKYASKAKNLADDMVRNTARDLLYYAVTQDAMLIFENLSRGFGRQGKRTFMAERQYTRMEDWLTAKLAYEGLPSKTYLSKTLAQYTSKTCSNCGFTITSADYDRVLEKLKKTATGWMTTINGKELKVEGQITYYNRYKRQNVVKDLSVELDRLSEESVNNDISSWTKGRSGEALSLLKKRFSHRPVQEKFVCLNCGFETHADEQAALNIARSWLFLRSQEYKKYQTNKTSTGNTDKRAFVETWQSFYRKKLKEVWKPAV

SEQ ID NO: 49545 - protein, 979 aa, synthetic construct
  REGION 1..979: note = engineered CasX variant
QEIKRINKIRRRLVKDSNTKKAGKTGPMKTLLVRVMTPDLRERLENLRKKPENIPQPISNTSRANLNKLLTDYTEMKKAILHVYWEEFQKDPVGLMSRVAQPASKKIDQNKLKPEMDEKGNLTTAGFACSQCGQPLFVYKLEQVSEKGKAYTNYFGRCNVAEHEKLILLAQLKPEKDSDEAVTYSLGKFGQRALDFYSIHVTKESTHPVKPLAQIAGNRYASGPVGKALRGACMGTIASFLSKYQDIIIEHQKVVKGNQKRLESLRELAGKENLEYPSVTLPPQPHTKEGVDAYNEVIARVRMWVNLNLWQKLKLSRDDAKPLLRLKGFPSFPLVERQANEVDWWDMVCNVKKLINEKKEDGKVFWQNLAGYKRQEALRPYLSSEEDRKKGKKFARYQLGDLLLHLEKKHGEDWGKVYDEAWERIDKKVEGLSKHIKLEEERRSEDAQSKAALTDWLRAKASFVIEGLKEADKDEFCRCELKLQKWYGDLRGKPFAIEAENSILDISGFSKQYNCAFIWQKDGVKKLNLYLIINYFKGGKLRFKKIKPEAFEANRFYTVINKKSGEIVPMEVNFNFDDPNLIILPLAFGKRQGREFIWNDLLSLETGSLKLANGRVIEKTLYNRRTRQDEPALFVALTFERREVLDSSNIKPMNLIGVDRGENIPAVIALTDPEGCPLSRFKDSLGNPTHILRIGESYKEKQRTIQAKKEVEQRRAGGYSRKYASKAKNLADDMVRNTARDLLYYAVTQDAMLIFENLSRGFGRQGKRTFMAERQYTRMEDWLTAKLAYEGLPSKTYLSKTLAQYTSKTCSNCGFTITSADYDRVLEKLKKTATGWMTTINGKELKVEGQITYYNRYKRQNVVKDLSVELDRLSEESVNNDISSWTKGRSGEALSLLKKRFSHRPVQEKFVCLNCGFETHADEQAALNIARSWLFLRSQEYKKYQTNKTTGKNTDKRAFVETWQSFYRKKLKEVWKPAV

SEQ ID NO: 49546 - protein, 979 aa, synthetic construct
  REGION 1..979: note = engineered CasX variant
QEIKRINKIRRRLVKDSNTKKAGKTGPMKTLLVRVMTPDLRERLENLRKKPENIPQPISNTSRANLNKLLTDYTEMKKAILHVYWEEFQKDPVGLMSRVAQPASKKIDQNKLKPEMDEKGNLTTAGFACSQCGQPLFVYKLEQVSEKGKAYTNYFGRCNVAEHEKLILLAQLKPEKDSDEAVTYSLGKFGQRALDFYSIHVTKESTHPVKPLAQIAGNRYASGPVGKALRDACMGTIASFLSKYQDIIIEHQKVVKGNQKRLESLRELAGKENLEYPSVTLPPQPHTKEGVDAYNEVIARVRMWVNLNLWQKLKLSRDDAKPLLRLKNFPSFPLVERQANEVDWWDMVCNVKKLINEKKEDGKVFWQNLAGYKRQEALRPYLSSEEDRKKGKKFARYQLGDLLLHLEKKHGEDWGKVYDEAWERIDKKVEGLSKHIKLEEERRSEDAQSKAALTDWLRAKASFVIEGLKEADKDEFCRCELKLQKWYGDLRGKPFAIEAENSILDISGFSKQYNCAFIWQKDGVKKLNLYLIINYFKGGKLRFKKIKPEAFEANRFYTVINKKSGEIVPMEVNFNFDDPNLIILPLAFGKRQGREFIWNDLLSLETGSLKLANGRVIEKTLYNRRTRQDEPALFVALTFERREVLDSSNIKPMNLIGVDRGENIPAVIALTDPEGCPLSRFKDSLGNPTHILRIGESYKEKQRTIQAKKEVEQRRAGGYSRKYASKAKNLADDMVRNTARDLLYYAVTQDAMLIFENLSRGFGRQGKRTFMAERQYTRMEDWLTAKLAYEGLPSKTYLSKTLAQYTSKTCSNCGFTITSADYDRVLEKLKKTATGWMTTINGKELKVEGQITYYNRYKRQNVVKDLSVELDRLSEESVNNDISSWTKGRSGEALSLLKKRFSHRPVQEKFVCLNCGFETHADEQAALNIARSWLFLRSQEYKKYQTNKTTGKNTDKRAFVETWQSFYRKKLKEVWKPAV

SEQ ID NO: 49547 - protein, 979 aa, synthetic construct
  REGION 1..979: note = engineered CasX variant
QEIKRINKIRRRLVKDSNTKKAGKTGPMKTLLVRVMTPDLRERLENLRKKPENIPQPISNTSRANLNKLLTDYTEMKKAILHVYWEEFQKDPVGLMSRVAQPASKKIDQNKLKPEMDEKGNLTTAGFACSQCGQPLFVYKLEQVSEKGKAYTNYFGRCNVAEHEKLILLAQLKPEKDSDEAVTYSLGKFGQRALDFYSIHVTKESTHPVKPLAQIAGNRYASGPVGKALRDACMGTIASFLSKYQDIIIEHQKVVKGNQKRLESLRELAGKENLEYPSVTLPPQPHTKEGVDAYNEVIARVRMWVNLNLWQKLKLSRDDAKPLLRLKGFPSFPLVERQANEVDWWDMVCNVKKLINEKKEDGKVFWQNLAGYKRQEALRPYLSSEEDRKKGKKFARYQLGDLLNHLEKKHGEDWGKVYDEAWERIDKKVEGLSKHIKLEEERRSEDAQSKAALTDWLRAKASFVIEGLKEADKDEFCRCELKLQKWYGDLRGKPFAIEAENSILDISGFSKQYNCAFIWQKDGVKKLNLYLIINYFKGGKLRFKKIKPEAFEANRFYTVINKKSGEIVPMEVNFNFDDPNLIILPLAFGKRQGREFIWNDLLSLETGSLKLANGRVIEKTLYNRRTRQDEPALFVALTFERREVLDSSNIKPMNLIGVDRGENIPAVIALTDPEGCPLSRFKDSLGNPTHILRIGESYKEKQRTIQAKKEVEQRRAGGYSRKYASKAKNLADDMVRNTARDLLYYAVTQDAMLIFENLSRGFGRQGKRTFMAERQYTRMEDWLTAKLAYEGLPSKTYLSKTLAQYTSKTCSNCGFTITSADYDRVLEKLKKTATGWMTTINGKELKVEGQITYYNRYKRQNVVKDLSVELDRLSEESVNNDISSWTKGRSGEALSLLKKRFSHRPVQEKFVCLNCGFETHADEQAALNIARSWLFLRSQEYKKYQTNKTTGKNTDKRAFVETWQSFYRKKLKEVWKPAV

SEQ ID NO: 49548 - protein, 979 aa, synthetic construct
  REGION 1..979: note = engineered CasX variant
QEIKRINKIRRRLVKDSNTKKAGKTGPMKTLLVRVMTPDLRERLENLRKKPENIPQPISNTSRANLNKLLTDYTEMKKAILHVYWEEFQKDPVGLMSRVAQPASKKIDQNKLKPEMDEKGNLTTAGFACSQCGQPLFVYKLEQVSEKGKAYTNYFGRCNVAEHEKLILLAQLKPEKDSDEAVTYSLGKFGQRALDFYSIHVTKESTHPVKPLAQIAGNRYASGPVGKALRDACMGTIASFLSKYQDIIIEHQKVVKGNQKRLESLRELAGKENLEYPSVTLPPQPHTKEGVDAYNEVIARVRMWVNLNLWQKLKLSRDDAKPLLRLKGFPSFPLVERQANEVDWWDMVCNVKKLINEKKEDGKVFWQNLAGYKRQEALRPYLSSEEDRKKGKKFARYQLGDLLWHLEKKHGEDWGKVYDEAWERIDKKVEGLSKHIKLEEERRSEDAQSKAALTDWLRAKASFVIEGLKEADKDEFCRCELKLQKWYGDLRGKPFAIEAENSILDISGFSKQYNCAFIWQKDGVKKLNLYLIINYFKGGKLRFKKIKPEAFEANRFYTVINKKSGEIVPMEVNFNFDDPNLIILPLAFGKRQGREFIWNDLLSLETGSLKLANGRVIEKTLYNRRTRQDEPALFVALTFERREVLDSSNIKPMNLIGVDRGENIPAVIALTDPEGCPLSRFKDSLGNPTHILRIGESYKEKQRTIQAKKEVEQRRAGGYSRKYASKAKNLADDMVRNTARDLLYYAVTQDAMLIFENLSRGFGRQGKRTFMAERQYTRMEDWLTAKLAYEGLPSKTYLSKTLAQYTSKTCSNCGFTITSADYDRVLEKLKKTATGWMTTINGKELKVEGQITYYNRYKRQNVVKDLSVELDRLSEESVNNDISSWTKGRSGEALSLLKKRFSHRPVQEKFVCLNCGFETHADEQAALNIARSWLFLRSQEYKKYQTNKTTGKNTDKRAFVETWQSFYRKKLKEVWKPAV

SEQ ID NO: 49549 - protein, 979 aa, synthetic construct
  REGION 1..979: note = engineered CasX variant
QEIKRINKIRRRLVKDSNTKKAGKTGPMKTLLVRVMTPDLRERLENLRKKPENIPQPISNTSRANLNKLLTDYTEMKKAILHVYWEEFQKDPVGLMSRVAQPASKKIDQNKLKPEMDEKGNLTTAGFACSQCGQPLFVYKLEQVSEKGKAYTNYFGRCNVAEHEKLILLAQLKPEKDSDEAVTYSLGKFGQRALDFYSIHVTKESTHPVKPLAQIAGNRYASGPVGKALRDACMGTIASFLSKYQDIIIEHQKVVKGNQKRLESLRELAGKENLEYPSVTLPPQPHTKEGVDAYNEVIARVRMWVNLNLWQKLKLSRDDAKPLLRLKGFPSFPLVERQANEVDWWDMVCNVKKLINEKKEDGKVFWQNLAGYKRQEALRPYLSSEEDRKKGKKFARYQLGDLLLHLYKKHGEDWGKVYDEAWERIDKKVEGLSKHIKLEEERRSEDAQSKAALTDWLRAKASFVIEGLKEADKDEFCRCELKLQKWYGDLRGKPFAIEAENSILDISGFSKQYNCAFIWQKDGVKKLNLYLIINYFKGGKLRFKKIKPEAFEANRFYTVINKKSGEIVPMEVNFNFDDPNLIILPLAFGKRQGREFIWNDLLSLETGSLKLANGRVIEKTLYNRRTRQDEPALFVALTFERREVLDSSNIKPMNLIGVDRGENIPAVIALTDPEGCPLSRFKDSLGNPTHILRIGESYKEKQRTIQAKKEVEQRRAGGYSRKYASKAKNLADDMVRNTARDLLYYAVTQDAMLIFENLSRGFGRQGKRTFMAERQYTRMEDWLTAKLAYEGLPSKTYLSKTLAQYTSKTCSNCGFTITSADYDRVLEKLKKTATGWMTTINGKELKVEGQITYYNRYKRQNVVKDLSVELDRLSEESVNNDISSWTKGRSGEALSLLKKRFSHRPVQEKFVCLNCGFETHADEQAALNIARSWLFLRSQEYKKYQTNKTTGKNTDKRAFVETWQSFYRKKLKEVWKPAV

SEQ ID NO: 49550 - protein, 979 aa, synthetic construct
  REGION 1..979: note = engineered CasX variant
QEIKRINKIRRRLVKDSNTKKAGKTGPMKTLLVRVMTPDLRERLENLRKKPENIPQPISNTSRANLNKLLTDYTEMKKAILHVYWEEFQKDPVGLMSRVAQPASKKIDQNKLKPEMDEKGNLTTAGFACSQCGQPLFVYKLEQVSEKGKAYTNYFGRCNVAEHEKLILLAQLKPEKDSDEAVTYSLGKFGQRALDFYSIHVTKESTHPVKPLAQIAGNRYASGPVGKALRDACMGTIASFLSKYQDIIIEHQKVVKGNQKRLESLRELAGKENLEYPSVTLPPQPHTKEGVDAYNEVIARVRMWVNLNLWQKLKLSRDDAKPLLRLKGFPSFPLVERQANEVDWWDMVCNVKKLINEKKEDGKVFWQNLAGYKRQEALRPYLSSEEDRKKGKKFARYQLGDLLLHLEKKHPEDWGKVYDEAWERIDKKVEGLSKHIKLEEERRSEDAQSKAALTDWLRAKASFVIEGLKEADKDEFCRCELKLQKWYGDLRGKPFAIEAENSILDISGFSKQYNCAFIWQKDGVKKLNLYLIINYFKGGKLRFKKIKPEAFEANRFYTVINKKSGEIVPMEVNFNFDDPNLIILPLAFGKRQGREFIWNDLLSLETGSLKLANGRVIEKTLYNRRTRQDEPALFVALTFERREVLDSSNIKPMNLIGVDRGENIPAVIALTDPEGCPLSRFKDSLGNPTHILRIGESYKEKQRTIQAKKEVEQRRAGGYSRKYASKAKNLADDMVRNTARDLLYYAVTQDAMLIFENLSRGFGRQGKRTFMAERQYTRMEDWLTAKLAYEGLPSKTYLSKTLAQYTSKTCSNCGFTITSADYDRVLEKLKKTATGWMTTINGKELKVEGQITYYNRYKRQNVVKDLSVELDRLSEESVNNDISSWTKGRSGEALSLLKKRFSHRPVQEKFVCLNCGFETHADEQAALNIARSWLFLRSQEYKKYQTNKTTGKNTDKRAFVETWQSFYRKKLKEVWKPAV

SEQ ID NO: 49551 - protein, 980 aa, synthetic construct
  REGION 1..980: note = engineered CasX variant
QEIKRINKIRRRLVKDSNTKKAGKTGPMKTLLVRVMTPDLRERLENLRKKPENIPQPISNTSRANLNKLLTDYTEMKKAILHVYWEEFQKDPVGLMSRVAQPASKKIDQNKLKPEMDEKGNLTTAGFACSQCGQPLFVYKLEQVSEKGKAYTNYFGRCNVAEHEKLILLAQLKPEKDSDEAVTYSLGKFGQRALDFYSIHVTKESTHPVKPLAQIAGNRYASGPVGKALRDACMGTIASFLSKYQDIIIEHQKVVKGNQKRLESLRELAGKENLEYPSVTLPPQPHTKEGVDAYNEVIARVRMWVNLNLWQKLKLSRDDAKPLLRLKGFPSFPLVERQANEVDWWDMVCNVKKLINEKKEDGKVFWQNLAGYKRQEALRPYLSSEEDRKKGKKFARYQLGDLLLHLEKKHGERDWGKVYDEAWERIDKKVEGLSKHIKLEEERRSEDAQSKAALTDWLRAKASFVIEGLKEADKDEFCRCELKLQKWYGDLRGKPFAIEAENSILDISGFSKQYNCAFIWQKDGVKKLNLYLIINYFKGGKLRFKKIKPEAFEANRFYTVINKKSGEIVPMEVNFNFDDPNLIILPLAFGKRQGREFIWNDLLSLETGSLKLANGRVIEKTLYNRRTRQDEPALFVALTFERREVLDSSNIKPMNLIGVDRGENIPAVIALTDPEGCPLSRFKDSLGNPTHILRIGESYKEKQRTIQAKKEVEQRRAGGYSRKYASKAKNLADDMVRNTARDLLYYAVTQDAMLIFENLSRGFGRQGKRTFMAERQYTRMEDWLTAKLAYEGLPSKTYLSKTLAQYTSKTCSNCGFTITSADYDRVLEKLKKTATGWMTTINGKELKVEGQITYYNRYKRQNVVKDLSVELDRLSEESVNNDISSWTKGRSGEALSLLKKRFSHRPVQEKFVCLNCGFETHADEQAALNIARSWLFLRSQEYKKYQTNKTTGKNTDKRAFVETWQSFYRKKLKEVWKPAV

SEQ ID NO: 49552 - protein, 980 aa, synthetic construct
  REGION 1..980: note = engineered CasX variant
QEIKRINKIRRRLVKDSNTKKAGKTGPMKTLLVRVMTPDLRERLENLRKKPENIPQPISNTSRANLNKLLTDYTEMKKAILHVYWEEFQKDPVGLMSRVAQPASKKIDQNKLKPEMDEKGNLTTAGFACSQCGQPLFVYKLEQVSEKGKAYTNYFGRCNVAEHEKLILLAQLKPEKDSDEAVTYSLGKFGQRALDFYSIHVTKESTHPVKPLAQIAGNRYASGPVGKALRDACMGTIASFLSKYQDIIIEHQKVVKGNQKRLESLRELAGKENLEYPSVTLPPQPHTKEGVDAYNEVIARVRMWVNLNLWQKLKLSRDDAKPLLRLKGFPSFPLVERQANEVDWWDMVCNVKKLINEKKEDGKVFWQNLAGYKRQEALRPYLSSEEDRKKGKKFARYQLGDLLLHLEKKHGEYDWGKVYDEAWERIDKKVEGLSKHIKLEEERRSEDAQSKAALTDWLRAKASFVIEGLKEADKDEFCRCELKLQKWYGDLRGKPFAIEAENSILDISGFSKQYNCAFIWQKDGVKKLNLYLIINYFKGGKLRFKKIKPEAFEANRFYTVINKKSGEIVPMEVNFNFDDPNLIILPLAFGKRQGREFIWNDLLSLETGSLKLANGRVIEKTLYNRRTRQDEPALFVALTFERREVLDSSNIKPMNLIGVDRGENIPAVIALTDPEGCPLSRFKDSLGNPTHILRIGESYKEKQRTIQAKKEVEQRRAGGYSRKYASKAKNLADDMVRNTARDLLYYAVTQDAMLIFENLSRGFGRQGKRTFMAERQYTRMEDWLTAKLAYEGLPSKTYLSKTLAQYTSKTCSNCGFTITSADYDRVLEKLKKTATGWMTTINGKELKVEGQITYYNRYKRQNVVKDLSVELDRLSEESVNNDISSWTKGRSGEALSLLKKRFSHRPVQEKFVCLNCGFETHADEQAALNIARSWLFLRSQEYKKYQTNKTTGKNTDKRAFVETWQSFYRKKLKEVWKPAV

SEQ ID NO: 49553 - protein, 979 aa, synthetic construct
  REGION 1..979: note = engineered CasX variant
QEIKRINKIRRRLVKDSNTKKAGKTGPMKTLLVRVMTPDLRERLENLRKKPENIPQPISNTSRANLNKLLTDYTEMKKAILHVYWEEFQKDPVGLMSRVAQPASKKIDQNKLKPEMDEKGNLTTAGFACSQCGQPLFVYKLEQVSEKGKAYTNYFGRCNVAEHEKLILLAQLKPEKDSDEAVTYSLGKFGQRALDFYSIHVTKESTHPVKPLAQIAGNRYASGPVGKALRDACMGTIASFLSKYQDIIIEHQKVVKGNQKRLESLRELAGKENLEYPSVTLPPQPHTKEGVDAYNEVIARVRMWVNLNLWQKLKLSRDDAKPLLRLKGFPSFPLVERQANEVDWWDMVCNVKKLINEKKEDGKVFWQNLAGYKRQEALRPYLSSEEDRKKGKKFARYQLGDLLLHLEKKHGEDWGDVYDEAWERIDKKVEGLSKHIKLEEERRSEDAQSKAALTDWLRAKASFVIEGLKEADKDEFCRCELKLQKWYGDLRGKPFAIEAENSILDISGFSKQYNCAFIWQKDGVKKLNLYLIINYFKGGKLRFKKIKPEAFEANRFYTVINKKSGEIVPMEVNFNFDDPNLIILPLAFGKRQGREFIWNDLLSLETGSLKLANGRVIEKTLYNRRTRQDEPALFVALTFERREVLDSSNIKPMNLIGVDRGENIPAVIALTDPEGCPLSRFKDSLGNPTHILRIGESYKEKQRTIQAKKEVEQRRAGGYSRKYASKAKNLADDMVRNTARDLLYYAVTQDAMLIFENLSRGFGRQGKRTFMAERQYTRMEDWLTAKLAYEGLPSKTYLSKTLAQYTSKTCSNCGFTITSADYDRVLEKLKKTATGWMTTINGKELKVEGQITYYNRYKRQNVVKDLSVELDRLSEESVNNDISSWTKGRSGEALSLLKKRFSHRPVQEKFVCLNCGFETHADEQAALNIARSWLFLRSQEYKKYQTNKTTGKNTDKRAFVETWQSFYRKKLKEVWKPAV

SEQ ID NO: 49554 - protein, 979 aa, synthetic construct
  REGION 1..979: note = engineered CasX variant
QEIKRINKIRRRLVKDSNTKKAGKTGPMKTLLVRVMTPDLRERLENLRKKPENIPQPISNTSRANLNKLLTDYTEMKKAILHVYWEEFQKDPVGLMSRVAQPASKKIDQNKLKPEMDEKGNLTTAGFACSQCGQPLFVYKLEQVSEKGKAYTNYFGRCNVAEHEKLILLAQLKPEKDSDEAVTYSLGKFGQRALDFYSIHVTKESTHPVKPLAQIAGNRYASGPVGKALRDACMGTIASFLSKYQDIIIEHQKVVKGNQKRLESLRELAGKENLEYPSVTLPPQPHTKEGVDAYNEVIARVRMWVNLNLWQKLKLSRDDAKPLLRLKGFPSFPLVERQANEVDWWDMVCNVKKLINEKKEDGKVFWQNLAGYKRQEALRPYLSSEEDRKKGKKFARYQLGDLLLHLEKKHGEDWGKVYGEAWERIDKKVEGLSKHIKLEEERRSEDAQSKAALTDWLRAKASFVIEGLKEADKDEFCRCELKLQKWYGDLRGKPFAIEAENSILDISGFSKQYNCAFIWQKDGVKKLNLYLIINYFKGGKLRFKKIKPEAFEANRFYTVINKKSGEIVPMEVNFNFDDPNLIILPLAFGKRQGREFIWNDLLSLETGSLKLANGRVIEKTLYNRRTRQDEPALFVALTFERREVLDSSNIKPMNLIGVDRGENIPAVIALTDPEGCPLSRFKDSLGNPTHILRIGESYKEKQRTIQAKKEVEQRRAGGYSRKYASKAKNLADDMVRNTARDLLYYAVTQDAMLIFENLSRGFGRQGKRTFMAERQYTRMEDWLTAKLAYEGLPSKTYLSKTLAQYTSKTCSNCGFTITSADYDRVLEKLKKTATGWMTTINGKELKVEGQITYYNRYKRQNVVKDLSVELDRLSEESVNNDISSWTKGRSGEALSLLKKRFSHRPVQEKFVCLNCGFETHADEQAALNIARSWLFLRSQEYKKYQTNKTTGKNTDKRAFVETWQSFYRKKLKEVWKPAV

SEQ ID NO: 49555 - protein, 979 aa, synthetic construct
  REGION 1..979: note = engineered CasX variant
QEIKRINKIRRRLVKDSNTKKAGKTGPMKTLLVRVMTPDLRERLENLRKKPENIPQPISNTSRANLNKLLTDYTEMKKAILHVYWEEFQKDPVGLMSRVAQPASKKIDQNKLKPEMDEKGNLTTAGFACSQCGQPLFVYKLEQVSEKGKAYTNYFGRCNVAEHEKLILLAQLKPEKDSDEAVTYSLGKFGQRALDFYSIHVTKESTHPVKPLAQIAGNRYASGPVGKALRDACMGTIASFLSKYQDIIIEHQKVVKGNQKRLESLRELAGKENLEYPSVTLPPQPHTKEGVDAYNEVIARVRMWVNLNLWQKLKLSRDDAKPLLRLKGFPSFPLVERQANEVDWWDMVCNVKKLINEKKEDGKVFWQNLAGYKRQEALRPYLSSEEDRKKGKKFARYQLGDLLLHLEKKHGEDWGKVYDEAWERIDKKVEGLSKHIKLEEERRSEDAQSKAALTDWLRAKASFVIEGKKEADKDEFCRCELKLQKWYGDLRGKPFAIEAENSILDISGFSKQYNCAFIWQKDGVKKLNLYLIINYFKGGKLRFKKIKPEAFEANRFYTVINKKSGEIVPMEVNFNFDDPNLIILPLAFGKRQGREFIWNDLLSLETGSLKLANGRVIEKTLYNRRTRQDEPALFVALTFERREVLDSSNIKPMNLIGVDRGENIPAVIALTDPEGCPLSRFKDSLGNPTHILRIGESYKEKQRTIQAKKEVEQRRAGGYSRKYASKAKNLADDMVRNTARDLLYYAVTQDAMLIFENLSRGFGRQGKRTFMAERQYTRMEDWLTAKLAYEGLPSKTYLSKTLAQYTSKTCSNCGFTITSADYDRVLEKLKKTATGWMTTINGKELKVEGQITYYNRYKRQNVVKDLSVELDRLSEESVNNDISSWTKGRSGEALSLLKKRFSHRPVQEKFVCLNCGFETHADEQAALNIARSWLFLRSQEYKKYQTNKTTGKNTDKRAFVETWQSFYRKKLKEVWKPAV

SEQ ID NO: 49556 - protein, 979 aa, synthetic construct
  REGION 1..979: note = engineered CasX variant
QEIKRINKIRRRLVKDSNTKKAGKTGPMKTLLVRVMTPDLRERLENLRKKPENIPQPISNTSRANLNKLLTDYTEMKKAILHVYWEEFQKDPVGLMSRVAQPASKKIDQNKLKPEMDEKGNLTTAGFACSQCGQPLFVYKLEQVSEKGKAYTNYFGRCNVAEHEKLILLAQLKPEKDSDEAVTYSLGKFGQRALDFYSIHVTKESTHPVKPLAQIAGNRYASGPVGKALRDACMGTIASFLSKYQDIIIEHQKVVKGNQKRLESLRELAGKENLEYPSVTLPPQPHTKEGVDAYNEVIARVRMWVNLNLWQKLKLSRDDAKPLLRLKGFPSFPLVERQANEVDWWDMVCNVKKLINEKKEDGKVFWQNLAGYKRQEALRPYLSSEEDRKKGKKFARYQLGDLLLHLEKKHGEDWGKVYDEAWERIDKKVEGLSKHIKLEEERRSEDAQSKAALTDWLRAKASFVIEGSKEADKDEFCRCELKLQKWYGDLRGKPFAIEAENSILDISGFSKQYNCAFIWQKDGVKKLNLYLIINYFKGGKLRFKKIKPEAFEANRFYTVINKKSGEIVPMEVNFNFDDPNLIILPLAFGKRQGREFIWNDLLSLETGSLKLANGRVIEKTLYNRRTRQDEPALFVALTFERREVLDSSNIKPMNLIGVDRGENIPAVIALTDPEGCPLSRFKDSLGNPTHILRIGESYKEKQRTIQAKKEVEQRRAGGYSRKYASKAKNLADDMVRNTARDLLYYAVTQDAMLIFENLSRGFGRQGKRTFMAERQYTRMEDWLTAKLAYEGLPSKTYLSKTLAQYTSKTCSNCGFTITSADYDRVLEKLKKTATGWMTTINGKELKVEGQITYYNRYKRQNVVKDLSVELDRLSEESVNNDISSWTKGRSGEALSLLKKRFSHRPVQEKFVCLNCGFETHADEQAALNIARSWLFLRSQEYKKYQTNKTTGKNTDKRAFVETWQSFYRKKLKEVWKPAV

SEQ ID NO: 49557 - protein, 980 aa, synthetic construct
  REGION 1..980: note = engineered CasX variant
QEIKRINKIRRRLVKDSNTKKAGKTGPMKTLLVRVMTPDLRERLENLRKKPENIPQPISNTSRANLNKLLTDYTEMKKAILHVYWEEFQKDPVGLMSRVAQPASKKIDQNKLKPEMDEKGNLTTAGFACSQCGQPLFVYKLEQVSEKGKAYTNYFGRCNVAEHEKLILLAQLKPEKDSDEAVTYSLGKFGQRALDFYSIHVTKESTHPVKPLAQIAGNRYASGPVGKALRDACMGTIASFLSKYQDIIIEHQKVVKGNQKRLESLRELAGKENLEYPSVTLPPQPHTKEGVDAYNEVIARVRMWVNLNLWQKLKLSRDDAKPLLRLKGFPSFPLVERQANEVDWWDMVCNVKKLINEKKEDGKVFWQNLAGYKRQEALRPYLSSEEDRKKGKKFARYQLGDLLLHLEKKHGEDWGKVYDEAWERIDKKVEGLSKHIKLEEERRSEDAQSKAALTDWLRAKASFVIEGLKEADDKDEFCRCELKLQKWYGDLRGKPFAIEAENSILDISGFSKQYNCAFIWQKDGVKKLNLYLIINYFKGGKLRFKKIKPEAFEANRFYTVINKKSGEIVPMEVNFNFDDPNLIILPLAFGKRQGREFIWNDLLSLETGSLKLANGRVIEKTLYNRRTRQDEPALFVALTFERREVLDSSNIKPMNLIGVDRGENIPAVIALTDPEGCPLSRFKDSLGNPTHILRIGESYKEKQRTIQAKKEVEQRRAGGYSRKYASKAKNLADDMVRNTARDLLYYAVTQDAMLIFENLSRGFGRQGKRTFMAERQYTRMEDWLTAKLAYEGLPSKTYLSKTLAQYTSKTCSNCGFTITSADYDRVLEKLKKTATGWMTTINGKELKVEGQITYYNRYKRQNVVKDLSVELDRLSEESVNNDISSWTKGRSGEALSLLKKRFSHRPVQEKFVCLNCGFETHADEQAALNIARSWLFLRSQEYKKYQTNKTTGKNTDKRAFVETWQSFYRKKLKEVWKPAV

SEQ ID NO: 49558 - protein, 980 aa, synthetic construct
  REGION 1..980: note = engineered CasX variant
QEIKRINKIRRRLVKDSNTKKAGKTGPMKTLLVRVMTPDLRERLENLRKKPENIPQPISNTSRANLNKLLTDYTEMKKAILHVYWEEFQKDPVGLMSRVAQPASKKIDQNKLKPEMDEKGNLTTAGFACSQCGQPLFVYKLEQVSEKGKAYTNYFGRCNVAEHEKLILLAQLKPEKDSDEAVTYSLGKFGQRALDFYSIHVTKESTHPVKPLAQIAGNRYASGPVGKALRDACMGTIASFLSKYQDIIIEHQKVVKGNQKRLESLRELAGKENLEYPSVTLPPQPHTKEGVDAYNEVIARVRMWVNLNLWQKLKLSRDDAKPLLRLKGFPSFPLVERQANEVDWWDMVCNVKKLINEKKEDGKVFWQNLAGYKRQEALRPYLSSEEDRKKGKKFARYQLGDLLLHLEKKHGEDWGKVYDEAWERIDKKVEGLSKHIKLEEERRSEDAQSKAALTDWLRAKASFVIEGLKEADKDEFCRCELKLQKWYGDLRGKPFAIEAENSILDISGFSKQYNCAFIWQKDGVKKLNLYLIINYFKGGKLRFKKIKPEAFEANRFYTVINKKSGEIVPMEVNFNFDDPNLIILPLAFGKRQGREFIWNDLLSLETGSLKLANGRVIEKTLYNRRTRQDEPALFVALTFERREVLDSSNIKPMNLIGVDRGENIPAVIALTDPEGCPLSRFKDSLGNPTHILRIGESYKEKQRTIQAKKEVEQRRAGGYSRKYASKAKNLADDMVRNTARDLLYYAVTQDAMLIFENLSRGFGRQGKRTFMAERQYTRMEDWLTAKLAYEGLPSKTYLSKTLAQYTSKTCSNCGFTITSADYDRVLEKLKKTATGWMTTINGKELKVEGQITYYNRYKRQNVVKDLSVELDRLSEESVNNDISSWTKGRSGNEALSLLKKRFSHRPVQEKFVCLNCGFETHADEQAALNIARSWLFLRSQEYKKYQTNKTTGKNTDKRAFVETWQSFYRKKLKEVWKPAV

SEQ ID NO: 49559 - protein, 979 aa, synthetic construct
  REGION 1..979: note = engineered CasX variant
QEIKRINKIRRRLVKDSNTKKAGKTGPMKTLLVRVMTPDLRERLENLRKKPENIPQPISNTSRANLNKLLTDYTEMKKAILHVYWEEFQKDPVGLMSRVAQPASKKIDQNKLKPEMDEKGNLTTAGFACSQCGQPLFVYKLEQVSEKGKAYTNYFGRCNVAEHEKLILLAQLKPEKDSDEAVTYSLGKFGQRALDFYSIHVTKESTHPVKPLAQIAGNRYASGPVGKALRDACMGTIASFLSKYQDIIIEHQKVVKGNQKRLESLRELAGKENLEYPSVTLPPQPHTKEGVDAYNEVIARVRMWVNLNLWQKLKLSRDDAKPLLRLKGFPSFPLVERQANEVDWWDMVCNVKKLINEKKEDGKVFWQNLAGYKRQEALRPYLSSEEDRQKGKKFARYQLGDLLLHLEKKHGEDWGKVYDEAWERIDKKVEGLSKHIKLEEERRSEDAQSKAALTDWLRAKASFVIEGLKEADKDEFCRCELKLQKWYGDLRGKPFAIEAENSILDISGFSKQYNCAFIWQKDGVKKLNLYLIINYFKGGKLRFKKIKPEAFEANRFYTVINKKSGEIVPMEVNFNFDDPNLIILPLAFGKRQGREFIWNDLLSLETGSLKLANGRVIEKTLYNRRTRQDEPALFVALTFERREVLDSSNIKPMNLIGVDRGENIPAVIALTDPEGCPLSRFKDSLGNPTHILRIGESYKEKQRTIQAKKEVEQRRAGGYSRKYASKAKNLADDMVRNTARDLLYYAVTQDAMLIFENLSRGFGRQGKRTFMAERQYTRMEDWLTAKLAYEGLPSKTYLSKTLAQYTSKTCSNCGFTITSADYDRVLEKLKKTATGWMTTINGKELKVEGQITYYNRYKRQNVVKDLSVELDRLSEESVNNDISSWTKGRSGEALSLLKKRFSHRPVQEKFVCLNCGFETHADEQAALNIARSWLFLRSQEYKKYQTNKTTGKNTDKRAFVETWQSFYRKKLKEVWKPAV

SEQ ID NO: 49560 - protein, 979 aa, synthetic construct
  REGION 1..979: note = engineered CasX variant
QEIKRINKIRRRLVKDSNTKKAGKTGPMKTLLVRVMTPDLRERLENLRKKPENIPQPISNTSRANLNKLLTDYTEMKKAILHVYWEEFQKDPVGLMSRVAQPASKKIDQNKLKPEMDEKGNLTTAGFACSQCGQPLFVYKLEQVSEKGKAYTNYFGRCNVAEHEKLILLAQLKPEKDSDEAVTYSLGKFGQRALDFYSIHVTKESTHPVKPLAQIAGNRYASGPVGKALRDACMGTIASFLSKYQDIIIEHQKVVKGNQKRLESLRELAGKENLEYPSVTLPPQPHTKEGVDAYNEVIARVRMWVNLNLWQKLKLSRDDAKPLLRLKGFPSFPLVERQANEVDWWDMVCNVKKLINEKKEDGKVFWQNLAGYKRQEALRPYLSSEEDRKKGKKFARYQLGDLLLHLEKKHGEDWGKVYDEAWERIDKKVEGLSKHIKLEEERRSEDAQSKAALTDWLRAKASFVIEGLKEADKDEFCRCELKLQKWYGDLRGKPFAIEAENSILDISGFSKQYNCAFIWQKDGVKKLNLYLIINYFKGGKLRFKKIKPEAFEANRFYTVINKKSGEIVPMEVNFNFDDPNLIILPLAFGKRQGREFIWNDLLSLETGSLKLANGRVIEKTLYNRRTRQDEPALFVALTFERREVLDSSNIKPMNLIGVDRGENIPAVIALTDPEGCPLSRFKDSLGNPTHILRIGESYKEKQRTIQAKKEVEQRRAGGYSRKYASKAKNLADDMVRNTARDLLYYAVTQDAMLIFENLSRGFGRQGKRTFMAERQYTRMEDWLTAKLAYEGLPSQTYLSKTLAQYTSKTCSNCGFTITSADYDRVLEKLKKTATGWMTTINGKELKVEGQITYYNRYKRQNVVKDLSVELDRLSEESVNNDISSWTKGRSGEALSLLKKRFSHRPVQEKFVCLNCGFETHADEQAALNIARSWLFLRSQEYKKYQTNKTTGKNTDKRAFVETWQSFYRKKLKEVWKPAV

SEQ ID NO: 49561 - protein, 979 aa, synthetic construct
  REGION 1..979: note = engineered CasX variant
QEIKRINKIRRRLVKDSNTKKAGKTGPMKTLLVRVMTPDLRERLENLRKKPENIPQPISNTSRANLNKLLTDYTEMKKAILHVYWEEFQKDPVGLMSRVAQPASKKIDQNKLKPEMDEKGNLTTAGFACSQCGQPLFVYKLEQVSEKGKAYTNYFGRCNVAEHEKLILLAQLKPEKDSDEAVTYSLGKFGQRALDFYSIHVTKESTHPVKPLAQIAGNRYASGPVGKALRDACMGTIASFLSKYQDIIIEHQKVVKGNQKRLESLRELAGKENLEYPSVTLPPQPHTKEGVDAYNEVIARVRMWVNLNLWQKLKLSRDDAKPLLRLKGFPSFPLVERQANEVDWWDMVCNVKKLINEKKEDGKVFWQNLAGYKRQEALRPYLSSEEDRKKGKKFARYQLGDLLLHLEKKHGEDWGKVYDEAWERIDKKVEGLSKHIKLEEERRSEDAQSKAALTDWLRAKASFVIEGLKEADKDEFCRCELKLQKWYGDLRGKPFAIEAENSILDISGFSKQYNCAFIWQKDGVKKLNLYLIINYFKGGKLRFKKIKPEAFEANRFYTVINKKSGEIVPMEVNFNFDDPNLIILPLAFGKRQGREFIWNDLLSLETGSLKLANGRVIEKTLYNRRTRQDEPALFVALTFERREVLDSSNIKPMNLIGVDRGENIPAVIALTDPEGCPLSRFKDSLGNPTHILRIGESYKEKQRTIQAKKEVEQRRAGGYSRKYASKAKNLADDMVRNTARDLLYYAVTQDAMLIFENLSRGFGRQGKRTFMAERQYTRMEDWLTAKLAYNGLPSKTYLSKTLAQYTSKTCSNCGFTITSADYDRVLEKLKKTATGWMTTINGKELKVEGQITYYNRYKRQNVVKDLSVELDRLSEESVNNDISSWTKGRSGEALSLLKKRFSHRPVQEKFVCLNCGFETHADEQAALNIARSWLFLRSQEYKKYQTNKTTGKNTDKRAFVETWQSFYRKKLKEVWKPAV

SEQ ID NO: 49562 - protein, 979 aa, synthetic construct
  REGION 1..979: note = engineered CasX variant
QEIKRINKIRRRLVKDSNTKKAGKTGPMKTLLVRVMTPDLRERLENLRKKPENIPQPISNTSRANLNKLLTDYTEMKKAILHVYWEEFQKDPVGLMSRVAQPASKKIDQNKLKPEMDEKGNLTTAGFACSQCGQPLFVYKLEQVSEKGKAYTNYFGRCNVAEHEKLIQLAQLKPEKDSDEAVTYSLGKFGQRALDFYSIHVTKESTHPVKPLAQIAGNRYASGPVGKALRDACMGTIASFLSKYQDIIIEHQKVVKGNQKRLESLRELAGKENLEYPSVTLPPQPHTKEGVDAYNEVIARVRMWVNLNLWQKLKLSRDDAKPLLRLKGFPSFPLVERQANEVDWWDMVCNVKKLINEKKEDGKVFWQNLAGYKRQEALRPYLSSEEDRKKGKKFARYQLGDLLLHLEKKHGEDWGKVYDEAWERIDKKVEGLSKHIKLEEERRSEDAQSKAALTDWLRAKASFVIEGLKEADKDEFCRCELKLQKWYGDLRGKPFAIEAENSILDISGFSKQYNCAFIWQKDGVKKLNLYLIINYFKGGKLRFKKIKPEAFEANRFYTVINKKSGEIVPMEVNFNFDDPNLIILPLAFGKRQGREFIWNDLLSLETGSLKLANGRVIEKTLYNRRTRQDEPALFVALTFERREVLDSSNIKPMNLIGVDRGENIPAVIALTDPEGCPLSRFKDSLGNPTHILRIGESYKEKQRTIQAKKEVEQRRAGGYSRKYASKAKNLADDMVRNTARDLLYYAVTQDAMLIFENLSRGFGRQGKRTFMAERQYTRMEDWLTAKLAYEGLPSKTYLSKTLAQYTSKTCSNCGFTITSADYDRVLEKLKKTATGWMTTINGKELKVEGQITYYNRYKRQNVVKDLSVELDRLSEESVNNDISSWTKGRSGEALSLLKKRFSHRPVQEKFVCLNCGFETHADEQAALNIARSWLFLRSQEYKKYQTNKTTGKNTDKRAFVETWQSFYRKKLKEVWKPAV

SEQ ID NO: 49563 - protein, 979 aa, synthetic construct
  REGION 1..979: note = engineered CasX variant
QEIKRINKIRRRLVKDSNTKKAGKTGPMKTLLVRVMTPDLRERLENLRKKPENIPQPISNTSRANLNKLLTDYTEMKKAILHVYWEEFQKDPVGLMSRVAQPASKKIDQNKLKPEMDEKGNLTTAGFACSQCGQPLFVYKLEQVSEKGKAYTNYFGRCNVAEHEKLILLAQLKPEKDSDEAVTYSLGKFGQRALDFYSIHVTKESTHPVKPLAQIAGNRYASGPVGKALRDACMGTIASFLSKYQDIIIEHQKVVKGNQKRLESLRELAGKENLEYPSVTLPPQPHTKEGVDAYNEVIARVRMWVNLNLWQKLKLSRDDAKPLLRLKGFPSFPLVERQANEVDWWDMVCNVKKLINEKKEDGKVFWQNLAIYKRQEALRPYLSSEEDRKKGKKFARYQLGDLLLHLEKKHGEDWGKVYDEAWERIDKKVEGLSKHIKLEEERRSEDAQSKAALTDWLRAKASFVIEGLKEADKDEFCRCELKLQKWYGDLRGKPFAIEAENSILDISGFSKQYNCAFIWQKDGVKKLNLYLIINYFKGGKLRFKKIKPEAFEANRFYTVINKKSGEIVPMEVNFNFDDPNLIILPLAFGKRQGREFIWNDLLSLETGSLKLANGRVIEKTLYNRRTRQDEPALFVALTFERREVLDSSNIKPMNLIGVDRGENIPAVIALTDPEGCPLSRFKDSLGNPTHILRIGESYKEKQRTIQAKKEVEQRRAGGYSRKYASKAKNLADDMVRNTARDLLYYAVTQDAMLIFENLSRGFGRQGKRTFMAERQYTRMEDWLTAKLAYEGLPSKTYLSKTLAQYTSKTCSNCGFTITSADYDRVLEKLKKTATGWMTTINGKELKVEGQITYYNRYKRQNVVKDLSVELDRLSEESVNNDISSWTKGRSGEALSLLKKRFSHRPVQEKFVCLNCGFETHADEQAALNIARSWLFLRSQEYKKYQTNKTTGKNTDKRAFVETWQSFYRKKLKEVWKPAV

SEQ ID NO: 49564 - protein, 979 aa, synthetic construct
  REGION 1..979: note = engineered CasX variant
QEIKRINKIRRRLVKDSNTKKAGKTGPMKTLLVRVMTPDLRERLENLRKKPENIPQPISNTSRANLNKLLTDYTEMKKAILHVYWEEFQKDPVGLMSRVAQPASKKIDQNKLKPEMDEKGNLTTAGFACSQCGQPLFVYKLEQVSEKGKAYTNYFGRCNVAEHEKLILLAQLKPEKDSDEAVTYSLGKFGQRALDFYSIHVTKESTHPVKPLAQIAGNRYASGPVGKALRDACMGTIASFLSKYQDIIIEHQKVVKGNQKRLESLRELAGKENLEYPSVTLPPQPHTKEGVDAYNEVIARVRMWVNLNLWQKLKLSRDDAKPLLRLKGFPSFPLVERQANEVDWWDMVCNVKKLINEKKEDGKVFWQNLAGYKRQEALRPYLSSEEDREKGKKFARYQLGDLLLHLEKKHGEDWGKVYDEAWERIDKKVEGLSKHIKLEEERRSEDAQSKAALTDWLRAKASFVIEGLKEADKDEFCRCELKLQKWYGDLRGKPFAIEAENSILDISGFSKQYNCAFIWQKDGVKKLNLYLIINYFKGGKLRFKKIKPEAFEANRFYTVINKKSGEIVPMEVNFNFDDPNLIILPLAFGKRQGREFIWNDLLSLETGSLKLANGRVIEKTLYNRRTRQDEPALFVALTFERREVLDSSNIKPMNLIGVDRGENIPAVIALTDPEGCPLSRFKDSLGNPTHILRIGESYKEKQRTIQAKKEVEQRRAGGYSRKYASKAKNLADDMVRNTARDLLYYAVTQDAMLIFENLSRGFGRQGKRTFMAERQYTRMEDWLTAKLAYEGLPSKTYLSKTLAQYTSKTCSNCGFTITSADYDRVLEKLKKTATGWMTTINGKELKVEGQITYYNRYKRQNVVKDLSVELDRLSEESVNNDISSWTKGRSGEALSLLKKRFSHRPVQEKFVCLNCGFETHADEQAALNIARSWLFLRSQEYKKYQTNKTTGKNTDKRAFVETWQSFYRKKLKEVWKPAV

SEQ ID NO: 49565 - protein, 979 aa, synthetic construct
  REGION 1..979: note = engineered CasX variant
QEIKRINKIRRRLVKDSNTKKAGKTGPMKTLLVRVMTPDLRERLENLRKKPENIPQPISNTSRANLNKLLTDYTEMKKAILHVYWEEFQKDPVGLMSRVAQPASKKIDQNKLKPEMDEKGNLTTAGFACSQCGQPLFVYKLEQVSEKGKAYTNYFGRCNVAEHEKLILLAQLKPEKDSDEAVTYSLGKFGQRALDFYSIHVTKESTHPVKPLAQIAGNRYASGPVGKALRDACMGTIASFLSKYQDIIIEHQKVVKGNQKRLESLRELAGKENLEYPSVTLPPQPHTKEGVDAYNEVIARVRMWVNLNLWQKLKLSRDDAKPLLRLKGFPSFPLVERQANEVDWWDMVCNVKKLINEKKEDGKVFWQNLAGYKRQEALRPYLSSEEDRKKGKKFARYQLGDLLLHLEKKHGEDWGKVYDEAWERIDKKVEGLSKHIKLEEERRSEDAQSKAALTDWLRAKASFVIEGLKEADKDEFCRCELKLQKWYGDLRGKPFAIEAENSILDISGFSKQYNCAFIWQKDGVKKLNLYLIINYFKGGKLRFKKIKPEAFEANRFYTVINKKSGEIVIMEVNFNFDDPNLIILPLAFGKRQGREFIWNDLLSLETGSLKLANGRVIEKTLYNRRTRQDEPALFVALTFERREVLDSSNIKPMNLIGVDRGENIPAVIALTDPEGCPLSRFKDSLGNPTHILRIGESYKEKQRTIQAKKEVEQRRAGGYSRKYASKAKNLADDMVRNTARDLLYYAVTQDAMLIFENLSRGFGRQGKRTFMAERQYTRMEDWLTAKLAYEGLPSKTYLSKTLAQYTSKTCSNCGFTITSADYDRVLEKLKKTATGWMTTINGKELKVEGQITYYNRYKRQNVVKDLSVELDRLSEESVNNDISSWTKGRSGEALSLLKKRFSHRPVQEKFVCLNCGFETHADEQAALNIARSWLFLRSQEYKKYQTNKTTGKNTDKRAFVETWQSFYRKKLKEVWKPAV

SEQ ID NO: 49566 - protein, 978 aa, synthetic construct
  REGION 1..978: note = engineered CasX variant
QEIKRINKIRRRLVKDSNTKKAGKTGPMKTLLVRVMTPDLRERLENLRKKPENIPQPISNTSRANLNKLLTDYTEMKKAILHVYWEEFQKDPVGLMSRVAQPASKKIDQNKLKPEMDEKGNLTTAGFACSQCGQPLFVYKLEQVSEKGKAYTNYFGRCNVAEHEKLILLAQLKPEKDSDEAVTYSLGKFGQRALDFYSIHVTKESTHPVKPLAQIAGNRYASGPVGKALRGACMGTIASFLSKYQDIIIEHQKVVKGNQKRLESLRELAGKENLEYPSVTLPPQPHTKEGVDAYNEVIARVRMWVNLNLWQKLKLSRDDAKPLLRLKKFPSFPLVERQANEVDWWDMVCNVKKLINEKKEDGKVFWQNLAGYKRQEALRPYLSSEEDRKKGKKFARYQLGDLLLHLEKKHGEDWGKVYDEAWERIDKKVEGLSKHIKLEEERRSEDAQSKAALTDWLRAKASFVIEGLKEADKDEFCRCELKLQKWYGDLRGKPFAIEAENSILDISGFSKQYNCAFIWQKDGVKKLNLYLIINYFKGGKLRFKKIKPEAFEANRFYTVINKKSGEIVPMEVNFNFDDPNLIILPLAFGKRQGREFIWNDLLSLETGSLKLANGRVIEKTLYNRRTRQDEPALFVALTFERREVLDSSNIKPMNLIGVDRGENIPAVIALTDPEGCPLSRFKDSLGNPTHILRIGESYKEKQRTIQAKKEVEQRRAGGYSRKYASKAKNLADDMVRNTARDLLYYAVTQDAMLIFENLSRGFGRQGKRTFMAERQYTRMEDWLTAKLAYEGLPSKTYLSKTLAQYTSKTCSNCGFTITSADYDRVLEKLKKTATGWMTTINGKELKVEGQITYYNRYKRQNVVKDLSVELDRLSEESVNNDISSWTKGRSGEALSLLKKRFSHRPVQEKFVCLNCGFETHADEQAALNIARSWLFLRSQEYKKYQTNKTTGNTDKRAFVETWQSFYRKKLKEVWKPAV

SEQ ID NO: 49567 - protein, 979 aa, synthetic construct
  REGION 1..979: note = engineered CasX variant
QEIKRINKIRRRLVKDSNTKKAGKTGPMKTLLVRVMTPDLRERLENLRKKPENIPQPISNTSRANLNKLLTDYTEMKKAILHVYWEEFQKDPVGLMSRVAQPASKKIDQNKLKPEMDEKGNLTTAGFACSQCGQPLFVYKLEQVSEKGKAYTNYFGRCNVAEHEKLILLAQLKPEKDSDEAVTYSLGKFGQRALDFYSIHVTKESTHPVKPLAQIAGNRYASGPVGKALRDACMGTIASFLSKYQDIIIEHQKVVKGNQKRLESLRELAGKENLEYPSVTLPPQPHTKEGVDAYNEVIARVRMWVNLNLWQKLKLSRDDAKPLLRLKKNFPSFPLVERQANEVDWWDMVCNVKKLINEKKEDGKVFWQNLAGYKRQEALRPYLSSEEDRKKGKKFARYQLGDLLLHLEKKHGEDWGKVYDEAWERIDKKVEGLSKHIKLEEERRSEDAQSKAALTDWLRAKASFVIEGLKEADKDEFCRCELKLQKWYGDLRGKPFAIEAENSILDISGFSKQYNCAFIWQKDGVKKLNLYLIINYFKGGKLRFKKIKPEAFEANRFYTVINKKSGEIVPMEVNFNFDDPNLIILPLAFGKRQGREFIWNDLLSLETGSLKLANGRVIEKTLYNRRTRQDEPALFVALTFERREVLDSSNIKPMNLIGVDRGENIPAVIALTDPEGCPLSRFKDSLGNPTHILRIGESYKEKQRTIQAKKEVEQRRAGGYSRKYASKAKNLADDMVRNTARDLLYYAVTQDAMLIFENLSRGFGRQGKRTFMAERQYTRMEDWLTAKLAYEGLPSKTYLSKTLAQYTSKTCSNCGFTITSADYDRVLEKLKKTATGWMTTINGKELKVEGQITYYNRYKRQNVVKDLSVELDRLSEESVNNDISSWTKGRSGEALSLLKKRFSHRPVQEKFVCLNCGFETHADEQAALNIARSWLFLRSQEYKKYQTNKTTGNTDKRAFVETWQSFYRKKLKEVWKPAV

SEQ ID NO: 49568 - protein, 978 aa, synthetic construct
  REGION 1..978: note = engineered CasX variant
QEIKRINKIRRRLVKDSNTKKAGKTGPMKTLLVRVMTPDLRERLENLRKKPENIPQPISNTSRANLNKLLTDYTEMKKAILHVYWEEFQKDPVGLMSRVAQPASKKIDQNKLKPEMDEKGNLTTAGFACSQCGQPLFVYKLEQVSEKGKAYTNYFGRCNVAEHEKLILLAQLKPEKDSDEAVTYSLGKFGQRALDFYSIHVTKESTHPVKPLAQIAGNRYASGPVGKALRDACMGTIASFLSKYQDIIIEHQKVVKGNQKRLESLRELAGKENLEYPSVTLPPQPHTKEGVDAYNEVIARVRMWVNLNLWQKLKLSRDDAKPLLRLKKFPSFPLVERQANEVDWWDMVCNVKKLINEKKEDGKVFWQNLAGYKRQEALRPYLSSEEDRKKGKKFARYQLGDLLNHLEKKHGEDWGKVYDEAWERIDKKVEGLSKHIKLEEERRSEDAQSKAALTDWLRAKASFVIEGLKEADKDEFCRCELKLQKWYGDLRGKPFAIEAENSILDISGFSKQYNCAFIWQKDGVKKLNLYLIINYFKGGKLRFKKIKPEAFEANRFYTVINKKSGEIVPMEVNFNFDDPNLIILPLAFGKRQGREFIWNDLLSLETGSLKLANGRVIEKTLYNRRTRQDEPALFVALTFERREVLDSSNIKPMNLIGVDRGENIPAVIALTDPEGCPLSRFKDSLGNPTHILRIGESYKEKQRTIQAKKEVEQRRAGGYSRKYASKAKNLADDMVRNTARDLLYYAVTQDAMLIFENLSRGFGRQGKRTFMAERQYTRMEDWLTAKLAYEGLPSKTYLSKTLAQYTSKTCSNCGFTITSADYDRVLEKLKKTATGWMTTINGKELKVEGQITYYNRYKRQNVVKDLSVELDRLSEESVNNDISSWTKGRSGEALSLLKKRFSHRPVQEKFVCLNCGFETHADEQAALNIARSWLFLRSQEYKKYQTNKTTGNTDKRAFVETWQSFYRKKLKEVWKPAV

SEQ ID NO: 49569 - protein, 978 aa, synthetic construct
  REGION 1..978: note = engineered CasX variant
QEIKRINKIRRRLVKDSNTKKAGKTGPMKTLLVRVMTPDLRERLENLRKKPENIPQPISNTSRANLNKLLTDYTEMKKAILHVYWEEFQKDPVGLMSRVAQPASKKIDQNKLKPEMDEKGNLTTAGFACSQCGQPLFVYKLEQVSEKGKAYTNYFGRCNVAEHEKLILLAQLKPEKDSDEAVTYSLGKFGQRALDFYSIHVTKESTHPVKPLAQIAGNRYASGPVGKALRDACMGTIASFLSKYQDIIIEHQKVVKGNQKRLESLRELAGKENLEYPSVTLPPQPHTKEGVDAYNEVIARVRMWVNLNLWQKLKLSRDDAKPLLRLKKFPSFPLVERQANEVDWWDMVCNVKKLINEKKEDGKVFWQNLAGYKRQEALRPYLSSEEDRKKGKKFARYQLGDLLWHLEKKHGEDWGKVYDEAWERIDKKVEGLSKHIKLEEERRSEDAQSKAALTDWLRAKASFVIEGLKEADKDEFCRCELKLQKWYGDLRGKPFAIEAENSILDISGFSKQYNCAFIWQKDGVKKLNLYLIINYFKGGKLRFKKIKPEAFEANRFYTVINKKSGEIVPMEVNFNFDDPNLIILPLAFGKRQGREFIWNDLLSLETGSLKLANGRVIEKTLYNRRTRQDEPALFVALTFERREVLDSSNIKPMNLIGVDRGENIPAVIALTDPEGCPLSRFKDSLGNPTHILRIGESYKEKQRTIQAKKEVEQRRAGGYSRKYASKAKNLADDMVRNTARDLLYYAVTQDAMLIFENLSRGFGRQGKRTFMAERQYTRMEDWLTAKLAYEGLPSKTYLSKTLAQYTSKTCSNCGFTITSADYDRVLEKLKKTATGWMTTINGKELKVEGQITYYNRYKRQNVVKDLSVELDRLSEESVNNDISSWTKGRSGEALSLLKKRFSHRPVQEKFVCLNCGFETHADEQAALNIARSWLFLRSQEYKKYQTNKTTGNTDKRAFVETWQSFYRKKLKEVWKPAV

SEQ ID NO: 49570 - protein, 978 aa, synthetic construct
  REGION 1..978: note = engineered CasX variant
QEIKRINKIRRRLVKDSNTKKAGKTGPMKTLLVRVMTPDLRERLENLRKKPENIPQPISNTSRANLNKLLTDYTEMKKAILHVYWEEFQKDPVGLMSRVAQPASKKIDQNKLKPEMDEKGNLTTAGFACSQCGQPLFVYKLEQVSEKGKAYTNYFGRCNVAEHEKLILLAQLKPEKDSDEAVTYSLGKFGQRALDFYSIHVTKESTHPVKPLAQIAGNRYASGPVGKALRDACMGTIASFLSKYQDIIIEHQKVVKGNQKRLESLRELAGKENLEYPSVTLPPQPHTKEGVDAYNEVIARVRMWVNLNLWQKLKLSRDDAKPLLRLKKFPSFPLVERQANEVDWWDMVCNVKKLINEKKEDGKVFWQNLAGYKRQEALRPYLSSEEDRKKGKKFARYQLGDLLLHLYKKHGEDWGKVYDEAWERIDKKVEGLSKHIKLEEERRSEDAQSKAALTDWLRAKASFVIEGLKEADKDEFCRCELKLQKWYGDLRGKPFAIEAENSILDISGFSKQYNCAFIWQKDGVKKLNLYLIINYFKGGKLRFKKIKPEAFEANRFYTVINKKSGEIVPMEVNFNFDDPNLIILPLAFGKRQGREFIWNDLLSLETGSLKLANGRVIEKTLYNRRTRQDEPALFVALTFERREVLDSSNIKPMNLIGVDRGENIPAVIALTDPEGCPLSRFKDSLGNPTHILRIGESYKEKQRTIQAKKEVEQRRAGGYSRKYASKAKNLADDMVRNTARDLLYYAVTQDAMLIFENLSRGFGRQGKRTFMAERQYTRMEDWLTAKLAYEGLPSKTYLSKTLAQYTSKTCSNCGFTITSADYDRVLEKLKKTATGWMTTINGKELKVEGQITYYNRYKRQNVVKDLSVELDRLSEESVNNDISSWTKGRSGEALSLLKKRFSHRPVQEKFVCLNCGFETHADEQAALNIARSWLFLRSQEYKKYQTNKTTGNTDKRAFVETWQSFYRKKLKEVWKPAV

SEQ ID NO: 49571 - protein, 978 aa, synthetic construct
  REGION 1..978: note = engineered CasX variant
QEIKRINKIRRRLVKDSNTKKAGKTGPMKTLLVRVMTPDLRERLENLRKKPENIPQPISNTSRANLNKLLTDYTEMKKAILHVYWEEFQKDPVGLMSRVAQPASKKIDQNKLKPEMDEKGNLTTAGFACSQCGQPLFVYKLEQVSEKGKAYTNYFGRCNVAEHEKLILLAQLKPEKDSDEAVTYSLGKFGQRALDFYSIHVTKESTHPVKPLAQIAGNRYASGPVGKALRDACMGTIASFLSKYQDIIIEHQKVVKGNQKRLESLRELAGKENLEYPSVTLPPQPHTKEGVDAYNEVIARVRMWVNLNLWQKLKLSRDDAKPLLRLKKFPSFPLVERQANEVDWWDMVCNVKKLINEKKEDGKVFWQNLAGYKRQEALRPYLSSEEDRKKGKKFARYQLGDLLLHLEKKHPEDWGKVYDEAWERIDKKVEGLSKHIKLEEERRSEDAQSKAALTDWLRAKASFVIEGLKEADKDEFCRCELKLQKWYGDLRGKPFAIEAENSILDISGFSKQYNCAFIWQKDGVKKLNLYLIINYFKGGKLRFKKIKPEAFEANRFYTVINKKSGEIVPMEVNFNFDDPNLIILPLAFGKRQGREFIWNDLLSLETGSLKLANGRVIEKTLYNRRTRQDEPALFVALTFERREVLDSSNIKPMNLIGVDRGENIPAVIALTDPEGCPLSRFKDSLGNPTHILRIGESYKEKQRTIQAKKEVEQRRAGGYSRKYASKAKNLADDMVRNTARDLLYYAVTQDAMLIFENLSRGFGRQGKRTFMAERQYTRMEDWLTAKLAYEGLPSKTYLSKTLAQYTSKTCSNCGFTITSADYDRVLEKLKKTATGWMTTINGKELKVEGQITYYNRYKRQNVVKDLSVELDRLSEESVNNDISSWTKGRSGEALSLLKKRFSHRPVQEKFVCLNCGFETHADEQAALNIARSWLFLRSQEYKKYQTNKTTGNTDKRAFVETWQSFYRKKLKEVWKPAV

SEQ ID NO: 49572 - protein, 979 aa, synthetic construct
  REGION 1..979: note = engineered CasX variant
QEIKRINKIRRRLVKDSNTKKAGKTGPMKTLLVRVMTPDLRERLENLRKKPENIPQPISNTSRANLNKLLTDYTEMKKAILHVYWEEFQKDPVGLMSRVAQPASKKIDQNKLKPEMDEKGNLTTAGFACSQCGQPLFVYKLEQVSEKGKAYTNYFGRCNVAEHEKLILLAQLKPEKDSDEAVTYSLGKFGQRALDFYSIHVTKESTHPVKPLAQIAGNRYASGPVGKALRDACMGTIASFLSKYQDIIIEHQKVVKGNQKRLESLRELAGKENLEYPSVTLPPQPHTKEGVDAYNEVIARVRMWVNLNLWQKLKLSRDDAKPLLRLKKFPSFPLVERQANEVDWWDMVCNVKKLINEKKEDGKVFWQNLAGYKRQEALRPYLSSEEDRKKGKKFARYQLGDLLLHLEKKHGERDWGKVYDEAWERIDKKVEGLSKHIKLEEERRSEDAQSKAALTDWLRAKASFVIEGLKEADKDEFCRCELKLQKWYGDLRGKPFAIEAENSILDISGFSKQYNCAFIWQKDGVKKLNLYLIINYFKGGKLRFKKIKPEAFEANRFYTVINKKSGEIVPMEVNFNFDDPNLIILPLAFGKRQGREFIWNDLLSLETGSLKLANGRVIEKTLYNRRTRQDEPALFVALTFERREVLDSSNIKPMNLIGVDRGENIPAVIALTDPEGCPLSRFKDSLGNPTHILRIGESYKEKQRTIQAKKEVEQRRAGGYSRKYASKAKNLADDMVRNTARDLLYYAVTQDAMLIFENLSRGFGRQGKRTFMAERQYTRMEDWLTAKLAYEGLPSKTYLSKTLAQYTSKTCSNCGFTITSADYDRVLEKLKKTATGWMTTINGKELKVEGQITYYNRYKRQNVVKDLSVELDRLSEESVNNDISSWTKGRSGEALSLLKKRFSHRPVQEKFVCLNCGFETHADEQAALNIARSWLFLRSQEYKKYQTNKTTGNTDKRAFVETWQSFYRKKLKEVWKPAV

SEQ ID NO: 49573 - protein, 979 aa, synthetic construct
  REGION 1..979: note = engineered CasX variant
QEIKRINKIRRRLVKDSNTKKAGKTGPMKTLLVRVMTPDLRERLENLRKKPENIPQPISNTSRANLNKLLTDYTEMKKAILHVYWEEFQKDPVGLMSRVAQPASKKIDQNKLKPEMDEKGNLTTAGFACSQCGQPLFVYKLEQVSEKGKAYTNYFGRCNVAEHEKLILLAQLKPEKDSDEAVTYSLGKFGQRALDFYSIHVTKESTHPVKPLAQIAGNRYASGPVGKALRDACMGTIASFLSKYQDIIIEHQKVVKGNQKRLESLRELAGKENLEYPSVTLPPQPHTKEGVDAYNEVIARVRMWVNLNLWQKLKLSRDDAKPLLRLKKFPSFPLVERQANEVDWWDMVCNVKKLINEKKEDGKVFWQNLAGYKRQEALRPYLSSEEDRKKGKKFARYQLGDLLLHLEKKHGEYDWGKVYDEAWERIDKKVEGLSKHIKLEEERRSEDAQSKAALTDWLRAKASFVIEGLKEADKDEFCRCELKLQKWYGDLRGKPFAIEAENSILDISGFSKQYNCAFIWQKDGVKKLNLYLIINYFKGGKLRFKKIKPEAFEANRFYTVINKKSGEIVPMEVNFNFDDPNLIILPLAFGKRQGREFIWNDLLSLETGSLKLANGRVIEKTLYNRRTRQDEPALFVALTFERREVLDSSNIKPMNLIGVDRGENIPAVIALTDPEGCPLSRFKDSLGNPTHILRIGESYKEKQRTIQAKKEVEQRRAGGYSRKYASKAKNLADDMVRNTARDLLYYAVTQDAMLIFENLSRGFGRQGKRTFMAERQYTRMEDWLTAKLAYEGLPSKTYLSKTLAQYTSKTCSNCGFTITSADYDRVLEKLKKTATGWMTTINGKELKVEGQITYYNRYKRQNVVKDLSVELDRLSEESVNNDISSWTKGRSGEALSLLKKRFSHRPVQEKFVCLNCGFETHADEQAALNIARSWLFLRSQEYKKYQTNKTTGNTDKRAFVETWQSFYRKKLKEVWKPAV

SEQ ID NO: 49574 - protein, 978 aa, synthetic construct
  REGION 1..978: note = engineered CasX variant
QEIKRINKIRRRLVKDSNTKKAGKTGPMKTLLVRVMTPDLRERLENLRKKPENIPQPISNTSRANLNKLLTDYTEMKKAILHVYWEEFQKDPVGLMSRVAQPASKKIDQNKLKPEMDEKGNLTTAGFACSQCGQPLFVYKLEQVSEKGKAYTNYFGRCNVAEHEKLILLAQLKPEKDSDEAVTYSLGKFGQRALDFYSIHVTKESTHPVKPLAQIAGNRYASGPVGKALRDACMGTIASFLSKYQDIIIEHQKVVKGNQKRLESLRELAGKENLEYPSVTLPPQPHTKEGVDAYNEVIARVRMWVNLNLWQKLKLSRDDAKPLLRLKKFPSFPLVERQANEVDWWDMVCNVKKLINEKKEDGKVFWQNLAGYKRQEALRPYLSSEEDRKKGKKFARYQLGDLLLHLEKKHGEDWGDVYDEAWERIDKKVEGLSKHIKLEEERRSEDAQSKAALTDWLRAKASFVIEGLKEADKDEFCRCELKLQKWYGDLRGKPFAIEAENSILDISGFSKQYNCAFIWQKDGVKKLNLYLIINYFKGGKLRFKKIKPEAFEANRFYTVINKKSGEIVPMEVNFNFDDPNLIILPLAFGKRQGREFIWNDLLSLETGSLKLANGRVIEKTLYNRRTRQDEPALFVALTFERREVLDSSNIKPMNLIGVDRGENIPAVIALTDPEGCPLSRFKDSLGNPTHILRIGESYKEKQRTIQAKKEVEQRRAGGYSRKYASKAKNLADDMVRNTARDLLYYAVTQDAMLIFENLSRGFGRQGKRTFMAERQYTRMEDWLTAKLAYEGLPSKTYLSKTLAQYTSKTCSNCGFTITSADYDRVLEKLKKTATGWMTTINGKELKVEGQITYYNRYKRQNVVKDLSVELDRLSEESVNNDISSWTKGRSGEALSLLKKRFSHRPVQEKFVCLNCGFETHADEQAALNIARSWLFLRSQEYKKYQTNKTTGNTDKRAFVETWQSFYRKKLKEVWKPAV

SEQ ID NO: 49575 - protein, 978 aa, synthetic construct
  REGION 1..978: note = engineered CasX variant
QEIKRINKIRRRLVKDSNTKKAGKTGPMKTLLVRVMTPDLRERLENLRKKPENIPQPISNTSRANLNKLLTDYTEMKKAILHVYWEEFQKDPVGLMSRVAQPASKKIDQNKLKPEMDEKGNLTTAGFACSQCGQPLFVYKLEQVSEKGKAYTNYFGRCNVAEHEKLILLAQLKPEKDSDEAVTYSLGKFGQRALDFYSIHVTKESTHPVKPLAQIAGNRYASGPVGKALRDACMGTIASFLSKYQDIIIEHQKVVKGNQKRLESLRELAGKENLEYPSVTLPPQPHTKEGVDAYNEVIARVRMWVNLNLWQKLKLSRDDAKPLLRLKKFPSFPLVERQANEVDWWDMVCNVKKLINEKKEDGKVFWQNLAGYKRQEALRPYLSSEEDRKKGKKFARYQLGDLLLHLEKKHGEDWGKVYGEAWERIDKKVEGLSKHIKLEEERRSEDAQSKAALTDWLRAKASFVIEGLKEADKDEFCRCELKLQKWYGDLRGKPFAIEAENSILDISGFSKQYNCAFIWQKDGVKKLNLYLIINYFKGGKLRFKKIKPEAFEANRFYTVINKKSGEIVPMEVNFNFDDPNLIILPLAFGKRQGREFIWNDLLSLETGSLKLANGRVIEKTLYNRRTRQDEPALFVALTFERREVLDSSNIKPMNLIGVDRGENIPAVIALTDPEGCPLSRFKDSLGNPTHILRIGESYKEKQRTIQAKKEVEQRRAGGYSRKYASKAKNLADDMVRNTARDLLYYAVTQDAMLIFENLSRGFGRQGKRTFMAERQYTRMEDWLTAKLAYEGLPSKTYLSKTLAQYTSKTCSNCGFTITSADYDRVLEKLKKTATGWMTTINGKELKVEGQITYYNRYKRQNVVKDLSVELDRLSEESVNNDISSWTKGRSGEALSLLKKRFSHRPVQEKFVCLNCGFETHADEQAALNIARSWLFLRSQEYKKYQTNKTTGNTDKRAFVETWQSFYRKKLKEVWKPAV

SEQ ID NO: 49576 - protein, 978 aa, synthetic construct
  REGION 1..978: note = engineered CasX variant
QEIKRINKIRRRLVKDSNTKKAGKTGPMKTLLVRVMTPDLRERLENLRKKPENIPQPISNTSRANLNKLLTDYTEMKKAILHVYWEEFQKDPVGLMSRVAQPASKKIDQNKLKPEMDEKGNLTTAGFACSQCGQPLFVYKLEQVSEKGKAYTNYFGRCNVAEHEKLILLAQLKPEKDSDEAVTYSLGKFGQRALDFYSIHVTKESTHPVKPLAQIAGNRYASGPVGKALRDACMGTIASFLSKYQDIIIEHQKVVKGNQKRLESLRELAGKENLEYPSVTLPPQPHTKEGVDAYNEVIARVRMWVNLNLWQKLKLSRDDAKPLLRLKKFPSFPLVERQANEVDWWDMVCNVKKLINEKKEDGKVFWQNLAGYKRQEALRPYLSSEEDRKKGKKFARYQLGDLLLHLEKKHGEDWGKVYDEAWERIDKKVEGLSKHIKLEEERRSEDAQSKAALTDWLRAKASFVIEGKKEADKDEFCRCELKLQKWYGDLRGKPFAIEAENSILDISGFSKQYNCAFIWQKDGVKKLNLYLIINYFKGGKLRFKKIKPEAFEANRFYTVINKKSGEIVPMEVNFNFDDPNLIILPLAFGKRQGREFIWNDLLSLETGSLKLANGRVIEKTLYNRRTRQDEPALFVALTFERREVLDSSNIKPMNLIGVDRGENIPAVIALTDPEGCPLSRFKDSLGNPTHILRIGESYKEKQRTIQAKKEVEQRRAGGYSRKYASKAKNLADDMVRNTARDLLYYAVTQDAMLIFENLSRGFGRQGKRTFMAERQYTRMEDWLTAKLAYEGLPSKTYLSKTLAQYTSKTCSNCGFTITSADYDRVLEKLKKTATGWMTTINGKELKVEGQITYYNRYKRQNVVKDLSVELDRLSEESVNNDISSWTKGRSGEALSLLKKRFSHRPVQEKFVCLNCGFETHADEQAALNIARSWLFLRSQEYKKYQTNKTTGNTDKRAFVETWQSFYRKKLKEVWKPAV

SEQ ID NO: 49577 - protein, 978 aa, synthetic construct
  REGION 1..978: note = engineered CasX variant
QEIKRINKIRRRLVKDSNTKKAGKTGPMKTLLVRVMTPDLRERLENLRKKPENIPQPISNTSRANLNKLLTDYTEMKKAILHVYWEEFQKDPVGLMSRVAQPASKKIDQNKLKPEMDEKGNLTTAGFACSQCGQPLFVYKLEQVSEKGKAYTNYFGRCNVAEHEKLILLAQLKPEKDSDEAVTYSLGKFGQRALDFYSIHVTKESTHPVKPLAQIAGNRYASGPVGKALRDACMGTIASFLSKYQDIIIEHQKVVKGNQKRLESLRELAGKENLEYPSVTLPPQPHTKEGVDAYNEVIARVRMWVNLNLWQKLKLSRDDAKPLLRLKKFPSFPLVERQANEVDWWDMVCNVKKLINEKKEDGKVFWQNLAGYKRQEALRPYLSSEEDRKKGKKFARYQLGDLLLHLEKKHGEDWGKVYDEAWERIDKKVEGLSKHIKLEEERRSEDAQSKAALTDWLRAKASFVIEGSKEADKDEFCRCELKLQKWYGDLRGKPFAIEAENSILDISGFSKQYNCAFIWQKDGVKKLNLYLIINYFKGGKLRFKKIKPEAFEANRFYTVINKKSGEIVPMEVNFNFDDPNLIILPLAFGKRQGREFIWNDLLSLETGSLKLANGRVIEKTLYNRRTRQDEPALFVALTFERREVLDSSNIKPMNLIGVDRGENIPAVIALTDPEGCPLSRFKDSLGNPTHILRIGESYKEKQRTIQAKKEVEQRRAGGYSRKYASKAKNLADDMVRNTARDLLYYAVTQDAMLIFENLSRGFGRQGKRTFMAERQYTRMEDWLTAKLAYEGLPSKTYLSKTLAQYTSKTCSNCGFTITSADYDRVLEKLKKTATGWMTTINGKELKVEGQITYYNRYKRQNVVKDLSVELDRLSEESVNNDISSWTKGRSGEALSLLKKRFSHRPVQEKFVCLNCGFETHADEQAALNIARSWLFLRSQEYKKYQTNKTTGNTDKRAFVETWQSFYRKKLKEVWKPAV

SEQ ID NO: 49578 - protein, 979 aa, synthetic construct
  REGION 1..979: note = engineered CasX variant
QEIKRINKIRRRLVKDSNTKKAGKTGPMKTLLVRVMTPDLRERLENLRKKPENIPQPISNTSRANLNKLLTDYTEMKKAILHVYWEEFQKDPVGLMSRVAQPASKKIDQNKLKPEMDEKGNLTTAGFACSQCGQPLFVYKLEQVSEKGKAYTNYFGRCNVAEHEKLILLAQLKPEKDSDEAVTYSLGKFGQRALDFYSIHVTKESTHPVKPLAQIAGNRYASGPVGKALRDACMGTIASFLSKYQDIIIEHQKVVKGNQKRLESLRELAGKENLEYPSVTLPPQPHTKEGVDAYNEVIARVRMWVNLNLWQKLKLSRDDAKPLLRLKKFPSFPLVERQANEVDWWDMVCNVKKLINEKKEDGKVFWQNLAGYKRQEALRPYLSSEEDRKKGKKFARYQLGDLLLHLEKKHGEDWGKVYDEAWERIDKKVEGLSKHIKLEEERRSEDAQSKAALTDWLRAKASFVIEGLKEADDKDEFCRCELKLQKWYGDLRGKPFAIEAENSILDISGFSKQYNCAFIWQKDGVKKLNLYLIINYFKGGKLRFKKIKPEAFEANRFYTVINKKSGEIVPMEVNFNFDDPNLIILPLAFGKRQGREFIWNDLLSLETGSLKLANGRVIEKTLYNRRTRQDEPALFVALTFERREVLDSSNIKPMNLIGVDRGENIPAVIALTDPEGCPLSRFKDSLGNPTHILRIGESYKEKQRTIQAKKEVEQRRAGGYSRKYASKAKNLADDMVRNTARDLLYYAVTQDAMLIFENLSRGFGRQGKRTFMAERQYTRMEDWLTAKLAYEGLPSKTYLSKTLAQYTSKTCSNCGFTITSADYDRVLEKLKKTATGWMTTINGKELKVEGQITYYNRYKRQNVVKDLSVELDRLSEESVNNDISSWTKGRSGEALSLLKKRFSHRPVQEKFVCLNCGFETHADEQAALNIARSWLFLRSQEYKKYQTNKTTGNTDKRAFVETWQSFYRKKLKEVWKPAV

SEQ ID NO: 49579 - protein, 979 aa, synthetic construct
  REGION 1..979: note = engineered CasX variant
QEIKRINKIRRRLVKDSNTKKAGKTGPMKTLLVRVMTPDLRERLENLRKKPENIPQPISNTSRANLNKLLTDYTEMKKAILHVYWEEFQKDPVGLMSRVAQPASKKIDQNKLKPEMDEKGNLTTAGFACSQCGQPLFVYKLEQVSEKGKAYTNYFGRCNVAEHEKLILLAQLKPEKDSDEAVTYSLGKFGQRALDFYSIHVTKESTHPVKPLAQIAGNRYASGPVGKALRDACMGTIASFLSKYQDIIIEHQKVVKGNQKRLESLRELAGKENLEYPSVTLPPQPHTKEGVDAYNEVIARVRMWVNLNLWQKLKLSRDDAKPLLRLKKFPSFPLVERQANEVDWWDMVCNVKKLINEKKEDGKVFWQNLAGYKRQEALRPYLSSEEDRKKGKKFARYQLGDLLLHLEKKHGEDWGKVYDEAWERIDKKVEGLSKHIKLEEERRSEDAQSKAALTDWLRAKASFVIEGLKEADKDEFCRCELKLQKWYGDLRGKPFAIEAENSILDISGFSKQYNCAFIWQKDGVKKLNLYLIINYFKGGKLRFKKIKPEAFEANRFYTVINKKSGEIVPMEVNFNFDDPNLIILPLAFGKRQGREFIWNDLLSLETGSLKLANGRVIEKTLYNRRTRQDEPALFVALTFERREVLDSSNIKPMNLIGVDRGENIPAVIALTDPEGCPLSRFKDSLGNPTHILRIGESYKEKQRTIQAKKEVEQRRAGGYSRKYASKAKNLADDMVRNTARDLLYYAVTQDAMLIFENLSRGFGRQGKRTFMAERQYTRMEDWLTAKLAYEGLPSKTYLSKTLAQYTSKTCSNCGFTITSADYDRVLEKLKKTATGWMTTINGKELKVEGQITYYNRYKRQNVVKDLSVELDRLSEESVNNDISSWTKGRSGNEALSLLKKRFSHRPVQEKFVCLNCGFETHADEQAALNIARSWLFLRSQEYKKYQTNKTTGNTDKRAFVETWQSFYRKKLKEVWKPAV

SEQ ID NO: 49580 - protein, 978 aa, synthetic construct
  REGION 1..978: note = engineered CasX variant
QEIKRINKIRRRLVKDSNTKKAGKTGPMKTLLVRVMTPDLRERLENLRKKPENIPQPISNTSRANLNKLLTDYTEMKKAILHVYWEEFQKDPVGLMSRVAQPASKKIDQNKLKPEMDEKGNLTTAGFACSQCGQPLFVYKLEQVSEKGKAYTNYFGRCNVAEHEKLILLAQLKPEKDSDEAVTYSLGKFGQRALDFYSIHVTKESTHPVKPLAQIAGNRYASGPVGKALRDACMGTIASFLSKYQDIIIEHQKVVKGNQKRLESLRELAGKENLEYPSVTLPPQPHTKEGVDAYNEVIARVRMWVNLNLWQKLKLSRDDAKPLLRLKKFPSFPLVERQANEVDWWDMVCNVKKLINEKKEDGKVFWQNLAGYKRQEALRPYLSSEEDRQKGKKFARYQLGDLLLHLEKKHGEDWGKVYDEAWERIDKKVEGLSKHIKLEEERRSEDAQSKAALTDWLRAKASFVIEGLKEADKDEFCRCELKLQKWYGDLRGKPFAIEAENSILDISGFSKQYNCAFIWQKDGVKKLNLYLIINYFKGGKLRFKKIKPEAFEANRFYTVINKKSGEIVPMEVNFNFDDPNLIILPLAFGKRQGREFIWNDLLSLETGSLKLANGRVIEKTLYNRRTRQDEPALFVALTFERREVLDSSNIKPMNLIGVDRGENIPAVIALTDPEGCPLSRFKDSLGNPTHILRIGESYKEKQRTIQAKKEVEQRRAGGYSRKYASKAKNLADDMVRNTARDLLYYAVTQDAMLIFENLSRGFGRQGKRTFMAERQYTRMEDWLTAKLAYEGLPSKTYLSKTLAQYTSKTCSNCGFTITSADYDRVLEKLKKTATGWMTTINGKELKVEGQITYYNRYKRQNVVKDLSVELDRLSEESVNNDISSWTKGRSGEALSLLKKRFSHRPVQEKFVCLNCGFETHADEQAALNIARSWLFLRSQEYKKYQTNKTTGNTDKRAFVETWQSFYRKKLKEVWKPAV

SEQ ID NO: 49581 - protein, 978 aa, synthetic construct
  REGION 1..978: note = engineered CasX variant
QEIKRINKIRRRLVKDSNTKKAGKTGPMKTLLVRVMTPDLRERLENLRKKPENIPQPISNTSRANLNKLLTDYTEMKKAILHVYWEEFQKDPVGLMSRVAQPASKKIDQNKLKPEMDEKGNLTTAGFACSQCGQPLFVYKLEQVSEKGKAYTNYFGRCNVAEHEKLILLAQLKPEKDSDEAVTYSLGKFGQRALDFYSIHVTKESTHPVKPLAQIAGNRYASGPVGKALRDACMGTIASFLSKYQDIIIEHQKVVKGNQKRLESLRELAGKENLEYPSVTLPPQPHTKEGVDAYNEVIARVRMWVNLNLWQKLKLSRDDAKPLLRLKKFPSFPLVERQANEVDWWDMVCNVKKLINEKKEDGKVFWQNLAGYKRQEALRPYLSSEEDRKKGKKFARYQLGDLLLHLEKKHGEDWGKVYDEAWERIDKKVEGLSKHIKLEEERRSEDAQSKAALTDWLRAKASFVIEGLKEADKDEFCRCELKLQKWYGDLRGKPFAIEAENSILDISGFSKQYNCAFIWQKDGVKKLNLYLIINYFKGGKLRFKKIKPEAFEANRFYTVINKKSGEIVPMEVNFNFDDPNLIILPLAFGKRQGREFIWNDLLSLETGSLKLANGRVIEKTLYNRRTRQDEPALFVALTFERREVLDSSNIKPMNLIGVDRGENIPAVIALTDPEGCPLSRFKDSLGNPTHILRIGESYKEKQRTIQAKKEVEQRRAGGYSRKYASKAKNLADDMVRNTARDLLYYAVTQDAMLIFENLSRGFGRQGKRTFMAERQYTRMEDWLTAKLAYEGLPSQTYLSKTLAQYTSKTCSNCGFTITSADYDRVLEKLKKTATGWMTTINGKELKVEGQITYYNRYKRQNVVKDLSVELDRLSEESVNNDISSWTKGRSGEALSLLKKRFSHRPVQEKFVCLNCGFETHADEQAALNIARSWLFLRSQEYKKYQTNKTTGNTDKRAFVETWQSFYRKKLKEVWKPAV

SEQ ID NO: 49582 - protein, 978 aa, synthetic construct
  REGION 1..978: note = engineered CasX variant
QEIKRINKIRRRLVKDSNTKKAGKTGPMKTLLVRVMTPDLRERLENLRKKPENIPQPISNTSRANLNKLLTDYTEMKKAILHVYWEEFQKDPVGLMSRVAQPASKKIDQNKLKPEMDEKGNLTTAGFACSQCGQPLFVYKLEQVSEKGKAYTNYFGRCNVAEHEKLILLAQLKPEKDSDEAVTYSLGKFGQRALDFYSIHVTKESTHPVKPLAQIAGNRYASGPVGKALRDACMGTIASFLSKYQDIIIEHQKVVKGNQKRLESLRELAGKENLEYPSVTLPPQPHTKEGVDAYNEVIARVRMWVNLNLWQKLKLSRDDAKPLLRLKKFPSFPLVERQANEVDWWDMVCNVKKLINEKKEDGKVFWQNLAGYKRQEALRPYLSSEEDRKKGKKFARYQLGDLLLHLEKKHGEDWGKVYDEAWERIDKKVEGLSKHIKLEEERRSEDAQSKAALTDWLRAKASFVIEGLKEADKDEFCRCELKLQKWYGDLRGKPFAIEAENSILDISGFSKQYNCAFIWQKDGVKKLNLYLIINYFKGGKLRFKKIKPEAFEANRFYTVINKKSGEIVPMEVNFNFDDPNLIILPLAFGKRQGREFIWNDLLSLETGSLKLANGRVIEKTLYNRRTRQDEPALFVALTFERREVLDSSNIKPMNLIGVDRGENIPAVIALTDPEGCPLSRFKDSLGNPTHILRIGESYKEKQRTIQAKKEVEQRRAGGYSRKYASKAKNLADDMVRNTARDLLYYAVTQDAMLIFENLSRGFGRQGKRTFMAERQYTRMEDWLTAKLAYNGLPSKTYLSKTLAQYTSKTCSNCGFTITSADYDRVLEKLKKTATGWMTTINGKELKVEGQITYYNRYKRQNVVKDLSVELDRLSEESVNNDISSWTKGRSGEALSLLKKRFSHRPVQEKFVCLNCGFETHADEQAALNIARSWLFLRSQEYKKYQTNKTTGNTDKRAFVETWQSFYRKKLKEVWKPAV

SEQ ID NO: 49583 - protein, 978 aa, synthetic construct
  REGION 1..978: note = engineered CasX variant
QEIKRINKIRRRLVKDSNTKKAGKTGPMKTLLVRVMTPDLRERLENLRKKPENIPQPISNTSRANLNKLLTDYTEMKKAILHVYWEEFQKDPVGLMSRVAQPASKKIDQNKLKPEMDEKGNLTTAGFACSQCGQPLFVYKLEQVSEKGKAYTNYFGRCNVAEHEKLIQLAQLKPEKDSDEAVTYSLGKFGQRALDFYSIHVTKESTHPVKPLAQIAGNRYASGPVGKALRDACMGTIASFLSKYQDIIIEHQKVVKGNQKRLESLRELAGKENLEYPSVTLPPQPHTKEGVDAYNEVIARVRMWVNLNLWQKLKLSRDDAKPLLRLKKFPSFPLVERQANEVDWWDMVCNVKKLINEKKEDGKVFWQNLAGYKRQEALRPYLSSEEDRKKGKKFARYQLGDLLLHLEKKHGEDWGKVYDEAWERIDKKVEGLSKHIKLEEERRSEDAQSKAALTDWLRAKASFVIEGLKEADKDEFCRCELKLQKWYGDLRGKPFAIEAENSILDISGFSKQYNCAFIWQKDGVKKLNLYLIINYFKGGKLRFKKIKPEAFEANRFYTVINKKSGEIVPMEVNFNFDDPNLIILPLAFGKRQGREFIWNDLLSLETGSLKLANGRVIEKTLYNRRTRQDEPALFVALTFERREVLDSSNIKPMNLIGVDRGENIPAVIALTDPEGCPLSRFKDSLGNPTHILRIGESYKEKQRTIQAKKEVEQRRAGGYSRKYASKAKNLADDMVRNTARDLLYYAVTQDAMLIFENLSRGFGRQGKRTFMAERQYTRMEDWLTAKLAYEGLPSKTYLSKTLAQYTSKTCSNCGFTITSADYDRVLEKLKKTATGWMTTINGKELKVEGQITYYNRYKRQNVVKDLSVELDRLSEESVNNDISSWTKGRSGEALSLLKKRFSHRPVQEKFVCLNCGFETHADEQAALNIARSWLFLRSQEYKKYQTNKTTGNTDKRAFVETWQSFYRKKLKEVWKPAV

SEQ ID NO: 49584 - protein, 978 aa, synthetic construct
  REGION 1..978: note = engineered CasX variant
QEIKRINKIRRRLVKDSNTKKAGKTGPMKTLLVRVMTPDLRERLENLRKKPENIPQPISNTSRANLNKLLTDYTEMKKAILHVYWEEFQKDPVGLMSRVAQPASKKIDQNKLKPEMDEKGNLTTAGFACSQCGQPLFVYKLEQVSEKGKAYTNYFGRCNVAEHEKLILLAQLKPEKDSDEAVTYSLGKFGQRALDFYSIHVTKESTHPVKPLAQIAGNRYASGPVGKALRDACMGTIASFLSKYQDIIIEHQKVVKGNQKRLESLRELAGKENLEYPSVTLPPQPHTKEGVDAYNEVIARVRMWVNLNLWQKLKLSRDDAKPLLRLKKFPSFPLVERQANEVDWWDMVCNVKKLINEKKEDGKVFWQNLAIYKRQEALRPYLSSEEDRKKGKKFARYQLGDLLLHLEKKHGEDWGKVYDEAWERIDKKVEGLSKHIKLEEERRSEDAQSKAALTDWLRAKASFVIEGLKEADKDEFCRCELKLQKWYGDLRGKPFAIEAENSILDISGFSKQYNCAFIWQKDGVKKLNLYLIINYFKGGKLRFKKIKPEAFEANRFYTVINKKSGEIVPMEVNFNFDDPNLIILPLAFGKRQGREFIWNDLLSLETGSLKLANGRVIEKTLYNRRTRQDEPALFVALTFERREVLDSSNIKPMNLIGVDRGENIPAVIALTDPEGCPLSRFKDSLGNPTHILRIGESYKEKQRTIQAKKEVEQRRAGGYSRKYASKAKNLADDMVRNTARDLLYYAVTQDAMLIFENLSRGFGRQGKRTFMAERQYTRMEDWLTAKLAYEGLPSKTYLSKTLAQYTSKTCSNCGFTITSADYDRVLEKLKKTATGWMTTINGKELKVEGQITYYNRYKRQNVVKDLSVELDRLSEESVNNDISSWTKGRSGEALSLLKKRFSHRPVQEKFVCLNCGFETHADEQAALNIARSWLFLRSQEYKKYQTNKTTGNTDKRAFVETWQSFYRKKLKEVWKPAV

SEQ ID NO: 49585 - protein, 978 aa, synthetic construct
  REGION 1..978: note = engineered CasX variant
QEIKRINKIRRRLVKDSNTKKAGKTGPMKTLLVRVMTPDLRERLENLRKKPENIPQPISNTSRANLNKLLTDYTEMKKAILHVYWEEFQKDPVGLMSRVAQPASKKIDQNKLKPEMDEKGNLTTAGFACSQCGQPLFVYKLEQVSEKGKAYTNYFGRCNVAEHEKLILLAQLKPEKDSDEAVTYSLGKFGQRALDFYSIHVTKESTHPVKPLAQIAGNRYASGPVGKALRDACMGTIASFLSKYQDIIIEHQKVVKGNQKRLESLRELAGKENLEYPSVTLPPQPHTKEGVDAYNEVIARVRMWVNLNLWQKLKLSRDDAKPLLRLKKFPSFPLVERQANEVDWWDMVCNVKKLINEKKEDGKVFWQNLAGYKRQEALRPYLSSEEDREKGKKFARYQLGDLLLHLEKKHGEDWGKVYDEAWERIDKKVEGLSKHIKLEEERRSEDAQSKAALTDWLRAKASFVIEGLKEADKDEFCRCELKLQKWYGDLRGKPFAIEAENSILDISGFSKQYNCAFIWQKDGVKKLNLYLIINYFKGGKLRFKKIKPEAFEANRFYTVINKKSGEIVPMEVNFNFDDPNLIILPLAFGKRQGREFIWNDLLSLETGSLKLANGRVIEKTLYNRRTRQDEPALFVALTFERREVLDSSNIKPMNLIGVDRGENIPAVIALTDPEGCPLSRFKDSLGNPTHILRIGESYKEKQRTIQAKKEVEQRRAGGYSRKYASKAKNLADDMVRNTARDLLYYAVTQDAMLIFENLSRGFGRQGKRTFMAERQYTRMEDWLTAKLAYEGLPSKTYLSKTLAQYTSKTCSNCGFTITSADYDRVLEKLKKTATGWMTTINGKELKVEGQITYYNRYKRQNVVKDLSVELDRLSEESVNNDISSWTKGRSGEALSLLKKRFSHRPVQEKFVCLNCGFETHADEQAALNIARSWLFLRSQEYKKYQTNKTTGNTDKRAFVETWQSFYRKKLKEVWKPAV

SEQ ID NO: 49586 - protein, 978 aa, synthetic construct
  REGION 1..978: note = engineered CasX variant
QEIKRINKIRRRLVKDSNTKKAGKTGPMKTLLVRVMTPDLRERLENLRKKPENIPQPISNTSRANLNKLLTDYTEMKKAILHVYWEEFQKDPVGLMSRVAQPASKKIDQNKLKPEMDEKGNLTTAGFACSQCGQPLFVYKLEQVSEKGKAYTNYFGRCNVAEHEKLILLAQLKPEKDSDEAVTYSLGKFGQRALDFYSIHVTKESTHPVKPLAQIAGNRYASGPVGKALRDACMGTIASFLSKYQDIIIEHQKVVKGNQKRLESLRELAGKENLEYPSVTLPPQPHTKEGVDAYNEVIARVRMWVNLNLWQKLKLSRDDAKPLLRLKKFPSFPLVERQANEVDWWDMVCNVKKLINEKKEDGKVFWQNLAGYKRQEALRPYLSSEEDRKKGKKFARYQLGDLLLHLEKKHGEDWGKVYDEAWERIDKKVEGLSKHIKLEEERRSEDAQSKAALTDWLRAKASFVIEGLKEADKDEFCRCELKLQKWYGDLRGKPFAIEAENSILDISGFSKQYNCAFIWQKDGVKKLNLYLIINYFKGGKLRFKKIKPEAFEANRFYTVINKKSGEIVIMEVNFNFDDPNLIILPLAFGKRQGREFIWNDLLSLETGSLKLANGRVIEKTLYNRRTRQDEPALFVALTFERREVLDSSNIKPMNLIGVDRGENIPAVIALTDPEGCPLSRFKDSLGNPTHILRIGESYKEKQRTIQAKKEVEQRRAGGYSRKYASKAKNLADDMVRNTARDLLYYAVTQDAMLIFENLSRGFGRQGKRTFMAERQYTRMEDWLTAKLAYEGLPSKTYLSKTLAQYTSKTCSNCGFTITSADYDRVLEKLKKTATGWMTTINGKELKVEGQITYYNRYKRQNVVKDLSVELDRLSEESVNNDISSWTKGRSGEALSLLKKRFSHRPVQEKFVCLNCGFETHADEQAALNIARSWLFLRSQEYKKYQTNKTTGNTDKRAFVETWQSFYRKKLKEVWKPAV

SEQ ID NO: 49587 - protein, 978 aa, synthetic construct
  REGION 1..978: note = engineered CasX variant
QEIKRINKIRRRLVKDSNTKKAGKTGPMKTLLVRVMTPDLRERLENLRKKPENIPQPISNTSRANLNKLLTDYTEMKKAILHVYWEEFQKDPVGLMSRVAQPASKKIDQNKLKPEMDEKGNLTTAGFACSQCGQPLFVYKLEQVSEKGKAYTNYFGRCNVAEHEKLILLAQLKPEKDSDEAVTYSLGKFGQRALDFYSIHVTKESTHPVKPLAQIAGNRYASGPVGKALRGACMGTIASFLSKYQDIIIEHQKVVKGNQKRLESLRELAGKENLEYPSVTLPPQPHTKEGVDAYNEVIARVRMWVNLNLWQKLKLSRDDAKPLLRLKGFPSFPLVERQANEVDWWDMVCNVKKLINEKKEDGKVFWQNLAGYKRQEALRPYLSSEEDRKKGKKFARYQLGDLLLHLEKKHGEDWGKVYDEAWERIDKKVEGLSKHIKLEEERRSEDAQSKAALTDWLRAKASFVIEGLKEADKDEFCRCELKLQKWYGDLRGKPFAIEAENSILDISGFSKQYNCAFIWQKDGVKKLNLYLIINYFKGGKLRFKKIKPEAFEANRFYTVINKKSGEIVPMEVNFNFDDPNLIILPLAFGKRQGREFIWNDLLSLETGSLKLANGRVIEKTLYNRRTRQDEPALFVALTFERREVLDSSNIKPMNLIGVDRGENIPAVIALTDPEGCPLSRFKDSLGNPTHILRIGERYKEKQRTIQAKKEVEQRRAGGYSRKYASKAKNLADDMVRNTARDLLYYAVTQDAMLIFENLSRGFGRQGKRTFMAERQYTRMEDWLTAKLAYEGLPSKTYLSKTLAQYTSKTCSNCGFTITSADYDRVLEKLKKTATGWMTTINGKELKVEGQITYYNRYKRQNVVKDLSVELDRLSEESVNNDISSWTKGRSGEALSLLKKRFSHRPVQEKFVCLNCGFETHADEQAALNIARSWLFLRSQEYKKYQTNKTTGNTDKRAFVETWQSFYRKKLKEVWKPAV

SEQ ID NO: 49588 - protein, 978 aa, synthetic construct
  REGION 1..978: note = engineered CasX variant
QEIKRINKIRRRLVKDSNTKKAGKTGPMKTLLVRVMTPDLRERLENLRKKPENIPQPISNTSRANLNKLLTDYTEMKKAILHVYWEEFQKDPVGLMSRVAQPASKKIDQNKLKPEMDEKGNLTTAGFACSQCGQPLFVYKLEQVSEKGKAYTNYFGRCNVAEHEKLILLAQLKPEKDSDEAVTYSLGKFGQRALDFYSIHVTKESTHPVKPLAQIAGNRYASGPVGKALRDACMGTIASFLSKYQDIIIEHQKVVKGNQKRLESLRELAGKENLEYPSVTLPPQPHTKEGVDAYNEVIARVRMWVNLNLWQKLKLSRDDAKPLLRLKNFPSFPLVERQANEVDWWDMVCNVKKLINEKKEDGKVFWQNLAGYKRQEALRPYLSSEEDRKKGKKFARYQLGDLLLHLEKKHGEDWGKVYDEAWERIDKKVEGLSKHIKLEEERRSEDAQSKAALTDWLRAKASFVIEGLKEADKDEFCRCELKLQKWYGDLRGKPFAIEAENSILDISGFSKQYNCAFIWQKDGVKKLNLYLIINYFKGGKLRFKKIKPEAFEANRFYTVINKKSGEIVPMEVNFNFDDPNLIILPLAFGKRQGREFIWNDLLSLETGSLKLANGRVIEKTLYNRRTRQDEPALFVALTFERREVLDSSNIKPMNLIGVDRGENIPAVIALTDPEGCPLSRFKDSLGNPTHILRIGERYKEKQRTIQAKKEVEQRRAGGYSRKYASKAKNLADDMVRNTARDLLYYAVTQDAMLIFENLSRGFGRQGKRTFMAERQYTRMEDWLTAKLAYEGLPSKTYLSKTLAQYTSKTCSNCGFTITSADYDRVLEKLKKTATGWMTTINGKELKVEGQITYYNRYKRQNVVKDLSVELDRLSEESVNNDISSWTKGRSGEALSLLKKRFSHRPVQEKFVCLNCGFETHADEQAALNIARSWLFLRSQEYKKYQTNKTTGNTDKRAFVETWQSFYRKKLKEVWKPAV

SEQ ID NO: 49589 - protein, 978 aa, synthetic construct
  REGION 1..978: note = engineered CasX variant
QEIKRINKIRRRLVKDSNTKKAGKTGPMKTLLVRVMTPDLRERLENLRKKPENIPQPISNTSRANLNKLLTDYTEMKKAILHVYWEEFQKDPVGLMSRVAQPASKKIDQNKLKPEMDEKGNLTTAGFACSQCGQPLFVYKLEQVSEKGKAYTNYFGRCNVAEHEKLILLAQLKPEKDSDEAVTYSLGKFGQRALDFYSIHVTKESTHPVKPLAQIAGNRYASGPVGKALRDACMGTIASFLSKYQDIIIEHQKVVKGNQKRLESLRELAGKENLEYPSVTLPPQPHTKEGVDAYNEVIARVRMWVNLNLWQKLKLSRDDAKPLLRLKGFPSFPLVERQANEVDWWDMVCNVKKLINEKKEDGKVFWQNLAGYKRQEALRPYLSSEEDRKKGKKFARYQLGDLLNHLEKKHGEDWGKVYDEAWERIDKKVEGLSKHIKLEEERRSEDAQSKAALTDWLRAKASFVIEGLKEADKDEFCRCELKLQKWYGDLRGKPFAIEAENSILDISGFSKQYNCAFIWQKDGVKKLNLYLIINYFKGGKLRFKKIKPEAFEANRFYTVINKKSGEIVPMEVNFNFDDPNLIILPLAFGKRQGREFIWNDLLSLETGSLKLANGRVIEKTLYNRRTRQDEPALFVALTFERREVLDSSNIKPMNLIGVDRGENIPAVIALTDPEGCPLSRFKDSLGNPTHILRIGERYKEKQRTIQAKKEVEQRRAGGYSRKYASKAKNLADDMVRNTARDLLYYAVTQDAMLIFENLSRGFGRQGKRTFMAERQYTRMEDWLTAKLAYEGLPSKTYLSKTLAQYTSKTCSNCGFTITSADYDRVLEKLKKTATGWMTTINGKELKVEGQITYYNRYKRQNVVKDLSVELDRLSEESVNNDISSWTKGRSGEALSLLKKRFSHRPVQEKFVCLNCGFETHADEQAALNIARSWLFLRSQEYKKYQTNKTTGNTDKRAFVETWQSFYRKKLKEVWKPAV

SEQ ID NO: 49590 - protein, 978 aa, synthetic construct
  REGION 1..978: note = engineered CasX variant
QEIKRINKIRRRLVKDSNTKKAGKTGPMKTLLVRVMTPDLRERLENLRKKPENIPQPISNTSRANLNKLLTDYTEMKKAILHVYWEEFQKDPVGLMSRVAQPASKKIDQNKLKPEMDEKGNLTTAGFACSQCGQPLFVYKLEQVSEKGKAYTNYFGRCNVAEHEKLILLAQLKPEKDSDEAVTYSLGKFGQRALDFYSIHVTKESTHPVKPLAQIAGNRYASGPVGKALRDACMGTIASFLSKYQDIIIEHQKVVKGNQKRLESLRELAGKENLEYPSVTLPPQPHTKEGVDAYNEVIARVRMWVNLNLWQKLKLSRDDAKPLLRLKGFPSFPLVERQANEVDWWDMVCNVKKLINEKKEDGKVFWQNLAGYKRQEALRPYLSSEEDRKKGKKFARYQLGDLLWHLEKKHGEDWGKVYDEAWERIDKKVEGLSKHIKLEEERRSEDAQSKAALTDWLRAKASFVIEGLKEADKDEFCRCELKLQKWYGDLRGKPFAIEAENSILDISGFSKQYNCAFIWQKDGVKKLNLYLIINYFKGGKLRFKKIKPEAFEANRFYTVINKKSGEIVPMEVNFNFDDPNLIILPLAFGKRQGREFIWNDLLSLETGSLKLANGRVIEKTLYNRRTRQDEPALFVALTFERREVLDSSNIKPMNLIGVDRGENIPAVIALTDPEGCPLSRFKDSLGNPTHILRIGERYKEKQRTIQAKKEVEQRRAGGYSRKYASKAKNLADDMVRNTARDLLYYAVTQDAMLIFENLSRGFGRQGKRTFMAERQYTRMEDWLTAKLAYEGLPSKTYLSKTLAQYTSKTCSNCGFTITSADYDRVLEKLKKTATGWMTTINGKELKVEGQITYYNRYKRQNVVKDLSVELDRLSEESVNNDISSWTKGRSGEALSLLKKRFSHRPVQEKFVCLNCGFETHADEQAALNIARSWLFLRSQEYKKYQTNKTTGNTDKRAFVETWQSFYRKKLKEVWKPAV

SEQ ID NO: 49591 - protein, 978 aa, synthetic construct
  REGION 1..978: note = engineered CasX variant
QEIKRINKIRRRLVKDSNTKKAGKTGPMKTLLVRVMTPDLRERLENLRKKPENIPQPISNTSRANLNKLLTDYTEMKKAILHVYWEEFQKDPVGLMSRVAQPASKKIDQNKLKPEMDEKGNLTTAGFACSQCGQPLFVYKLEQVSEKGKAYTNYFGRCNVAEHEKLILLAQLKPEKDSDEAVTYSLGKFGQRALDFYSIHVTKESTHPVKPLAQIAGNRYASGPVGKALRDACMGTIASFLSKYQDIIIEHQKVVKGNQKRLESLRELAGKENLEYPSVTLPPQPHTKEGVDAYNEVIARVRMWVNLNLWQKLKLSRDDAKPLLRLKGFPSFPLVERQANEVDWWDMVCNVKKLINEKKEDGKVFWQNLAGYKRQEALRPYLSSEEDRKKGKKFARYQLGDLLLHLYKKHGEDWGKVYDEAWERIDKKVEGLSKHIKLEEERRSEDAQSKAALTDWLRAKASFVIEGLKEADKDEFCRCELKLQKWYGDLRGKPFAIEAENSILDISGFSKQYNCAFIWQKDGVKKLNLYLIINYFKGGKLRFKKIKPEAFEANRFYTVINKKSGEIVPMEVNFNFDDPNLIILPLAFGKRQGREFIWNDLLSLETGSLKLANGRVIEKTLYNRRTRQDEPALFVALTFERREVLDSSNIKPMNLIGVDRGENIPAVIALTDPEGCPLSRFKDSLGNPTHILRIGERYKEKQRTIQAKKEVEQRRAGGYSRKYASKAKNLADDMVRNTARDLLYYAVTQDAMLIFENLSRGFGRQGKRTFMAERQYTRMEDWLTAKLAYEGLPSKTYLSKTLAQYTSKTCSNCGFTITSADYDRVLEKLKKTATGWMTTINGKELKVEGQITYYNRYKRQNVVKDLSVELDRLSEESVNNDISSWTKGRSGEALSLLKKRFSHRPVQEKFVCLNCGFETHADEQAALNIARSWLFLRSQEYKKYQTNKTTGNTDKRAFVETWQSFYRKKLKEVWKPAV

SEQ ID NO: 49592 - protein, 978 aa, synthetic construct
  REGION 1..978: note = engineered CasX variant
QEIKRINKIRRRLVKDSNTKKAGKTGPMKTLLVRVMTPDLRERLENLRKKPENIPQPISNTSRANLNKLLTDYTEMKKAILHVYWEEFQKDPVGLMSRVAQPASKKIDQNKLKPEMDEKGNLTTAGFACSQCGQPLFVYKLEQVSEKGKAYTNYFGRCNVAEHEKLILLAQLKPEKDSDEAVTYSLGKFGQRALDFYSIHVTKESTHPVKPLAQIAGNRYASGPVGKALRDACMGTIASFLSKYQDIIIEHQKVVKGNQKRLESLRELAGKENLEYPSVTLPPQPHTKEGVDAYNEVIARVRMWVNLNLWQKLKLSRDDAKPLLRLKGFPSFPLVERQANEVDWWDMVCNVKKLINEKKEDGKVFWQNLAGYKRQEALRPYLSSEEDRKKGKKFARYQLGDLLLHLEKKHPEDWGKVYDEAWERIDKKVEGLSKHIKLEEERRSEDAQSKAALTDWLRAKASFVIEGLKEADKDEFCRCELKLQKWYGDLRGKPFAIEAENSILDISGFSKQYNCAFIWQKDGVKKLNLYLIINYFKGGKLRFKKIKPEAFEANRFYTVINKKSGEIVPMEVNFNFDDPNLIILPLAFGKRQGREFIWNDLLSLETGSLKLANGRVIEKTLYNRRTRQDEPALFVALTFERREVLDSSNIKPMNLIGVDRGENIPAVIALTDPEGCPLSRFKDSLGNPTHILRIGERYKEKQRTIQAKKEVEQRRAGGYSRKYASKAKNLADDMVRNTARDLLYYAVTQDAMLIFENLSRGFGRQGKRTFMAERQYTRMEDWLTAKLAYEGLPSKTYLSKTLAQYTSKTCSNCGFTITSADYDRVLEKLKKTATGWMTTINGKELKVEGQITYYNRYKRQNVVKDLSVELDRLSEESVNNDISSWTKGRSGEALSLLKKRFSHRPVQEKFVCLNCGFETHADEQAALNIARSWLFLRSQEYKKYQTNKTTGNTDKRAFVETWQSFYRKKLKEVWKPAV

SEQ ID NO: 49593 - protein, 979 aa, synthetic construct
  REGION 1..979: note = engineered CasX variant
QEIKRINKIRRRLVKDSNTKKAGKTGPMKTLLVRVMTPDLRERLENLRKKPENIPQPISNTSRANLNKLLTDYTEMKKAILHVYWEEFQKDPVGLMSRVAQPASKKIDQNKLKPEMDEKGNLTTAGFACSQCGQPLFVYKLEQVSEKGKAYTNYFGRCNVAEHEKLILLAQLKPEKDSDEAVTYSLGKFGQRALDFYSIHVTKESTHPVKPLAQIAGNRYASGPVGKALRDACMGTIASFLSKYQDIIIEHQKVVKGNQKRLESLRELAGKENLEYPSVTLPPQPHTKEGVDAYNEVIARVRMWVNLNLWQKLKLSRDDAKPLLRLKGFPSFPLVERQANEVDWWDMVCNVKKLINEKKEDGKVFWQNLAGYKRQEALRPYLSSEEDRKKGKKFARYQLGDLLLHLEKKHGERDWGKVYDEAWERIDKKVEGLSKHIKLEEERRSEDAQSKAALTDWLRAKASFVIEGLKEADKDEFCRCELKLQKWYGDLRGKPFAIEAENSILDISGFSKQYNCAFIWQKDGVKKLNLYLIINYFKGGKLRFKKIKPEAFEANRFYTVINKKSGEIVPMEVNFNFDDPNLIILPLAFGKRQGREFIWNDLLSLETGSLKLANGRVIEKTLYNRRTRQDEPALFVALTFERREVLDSSNIKPMNLIGVDRGENIPAVIALTDPEGCPLSRFKDSLGNPTHILRIGERYKEKQRTIQAKKEVEQRRAGGYSRKYASKAKNLADDMVRNTARDLLYYAVTQDAMLIFENLSRGFGRQGKRTFMAERQYTRMEDWLTAKLAYEGLPSKTYLSKTLAQYTSKTCSNCGFTITSADYDRVLEKLKKTATGWMTTINGKELKVEGQITYYNRYKRQNVVKDLSVELDRLSEESVNNDISSWTKGRSGEALSLLKKRFSHRPVQEKFVCLNCGFETHADEQAALNIARSWLFLRSQEYKKYQTNKTTGNTDKRAFVETWQSFYRKKLKEVWKPAV

SEQ ID NO: 49594 - protein, 979 aa, synthetic construct
  REGION 1..979: note = engineered CasX variant
QEIKRINKIRRRLVKDSNTKKAGKTGPMKTLLVRVMTPDLRERLENLRKKPENIPQPISNTSRANLNKLLTDYTEMKKAILHVYWEEFQKDPVGLMSRVAQPASKKIDQNKLKPEMDEKGNLTTAGFACSQCGQPLFVYKLEQVSEKGKAYTNYFGRCNVAEHEKLILLAQLKPEKDSDEAVTYSLGKFGQRALDFYSIHVTKESTHPVKPLAQIAGNRYASGPVGKALRDACMGTIASFLSKYQDIIIEHQKVVKGNQKRLESLRELAGKENLEYPSVTLPPQPHTKEGVDAYNEVIARVRMWVNLNLWQKLKLSRDDAKPLLRLKGFPSFPLVERQANEVDWWDMVCNVKKLINEKKEDGKVFWQNLAGYKRQEALRPYLSSEEDRKKGKKFARYQLGDLLLHLEKKHGEYDWGKVYDEAWERIDKKVEGLSKHIKLEEERRSEDAQSKAALTDWLRAKASFVIEGLKEADKDEFCRCELKLQKWYGDLRGKPFAIEAENSILDISGFSKQYNCAFIWQKDGVKKLNLYLIINYFKGGKLRFKKIKPEAFEANRFYTVINKKSGEIVPMEVNFNFDDPNLIILPLAFGKRQGREFIWNDLLSLETGSLKLANGRVIEKTLYNRRTRQDEPALFVALTFERREVLDSSNIKPMNLIGVDRGENIPAVIALTDPEGCPLSRFKDSLGNPTHILRIGERYKEKQRTIQAKKEVEQRRAGGYSRKYASKAKNLADDMVRNTARDLLYYAVTQDAMLIFENLSRGFGRQGKRTFMAERQYTRMEDWLTAKLAYEGLPSKTYLSKTLAQYTSKTCSNCGFTITSADYDRVLEKLKKTATGWMTTINGKELKVEGQITYYNRYKRQNVVKDLSVELDRLSEESVNNDISSWTKGRSGEALSLLKKRFSHRPVQEKFVCLNCGFETHADEQAALNIARSWLFLRSQEYKKYQTNKTTGNTDKRAFVETWQSFYRKKLKEVWKPAV

SEQ ID NO: 49595 - protein, 978 aa, synthetic construct
  REGION 1..978: note = engineered CasX variant
QEIKRINKIRRRLVKDSNTKKAGKTGPMKTLLVRVMTPDLRERLENLRKKPENIPQPISNTSRANLNKLLTDYTEMKKAILHVYWEEFQKDPVGLMSRVAQPASKKIDQNKLKPEMDEKGNLTTAGFACSQCGQPLFVYKLEQVSEKGKAYTNYFGRCNVAEHEKLILLAQLKPEKDSDEAVTYSLGKFGQRALDFYSIHVTKESTHPVKPLAQIAGNRYASGPVGKALRDACMGTIASFLSKYQDIIIEHQKVVKGNQKRLESLRELAGKENLEYPSVTLPPQPHTKEGVDAYNEVIARVRMWVNLNLWQKLKLSRDDAKPLLRLKGFPSFPLVERQANEVDWWDMVCNVKKLINEKKEDGKVFWQNLAGYKRQEALRPYLSSEEDRKKGKKFARYQLGDLLLHLEKKHGEDWGDVYDEAWERIDKKVEGLSKHIKLEEERRSEDAQSKAALTDWLRAKASFVIEGLKEADKDEFCRCELKLQKWYGDLRGKPFAIEAENSILDISGFSKQYNCAFIWQKDGVKKLNLYLIINYFKGGKLRFKKIKPEAFEANRFYTVINKKSGEIVPMEVNFNFDDPNLIILPLAFGKRQGREFIWNDLLSLETGSLKLANGRVIEKTLYNRRTRQDEPALFVALTFERREVLDSSNIKPMNLIGVDRGENIPAVIALTDPEGCPLSRFKDSLGNPTHILRIGERYKEKQRTIQAKKEVEQRRAGGYSRKYASKAKNLADDMVRNTARDLLYYAVTQDAMLIFENLSRGFGRQGKRTFMAERQYTRMEDWLTAKLAYEGLPSKTYLSKTLAQYTSKTCSNCGFTITSADYDRVLEKLKKTATGWMTTINGKELKVEGQITYYNRYKRQNVVKDLSVELDRLSEESVNNDISSWTKGRSGEALSLLKKRFSHRPVQEKFVCLNCGFETHADEQAALNIARSWLFLRSQEYKKYQTNKTTGNTDKRAFVETWQSFYRKKLKEVWKPAV

SEQ ID NO: 49596 - protein, 978 aa, synthetic construct
  REGION 1..978: note = engineered CasX variant
QEIKRINKIRRRLVKDSNTKKAGKTGPMKTLLVRVMTPDLRERLENLRKKPENIPQPISNTSRANLNKLLTDYTEMKKAILHVYWEEFQKDPVGLMSRVAQPASKKIDQNKLKPEMDEKGNLTTAGFACSQCGQPLFVYKLEQVSEKGKAYTNYFGRCNVAEHEKLILLAQLKPEKDSDEAVTYSLGKFGQRALDFYSIHVTKESTHPVKPLAQIAGNRYASGPVGKALRDACMGTIASFLSKYQDIIIEHQKVVKGNQKRLESLRELAGKENLEYPSVTLPPQPHTKEGVDAYNEVIARVRMWVNLNLWQKLKLSRDDAKPLLRLKGFPSFPLVERQANEVDWWDMVCNVKKLINEKKEDGKVFWQNLAGYKRQEALRPYLSSEEDRKKGKKFARYQLGDLLLHLEKKHGEDWGKVYGEAWERIDKKVEGLSKHIKLEEERRSEDAQSKAALTDWLRAKASFVIEGLKEADKDEFCRCELKLQKWYGDLRGKPFAIEAENSILDISGFSKQYNCAFIWQKDGVKKLNLYLIINYFKGGKLRFKKIKPEAFEANRFYTVINKKSGEIVPMEVNFNFDDPNLIILPLAFGKRQGREFIWNDLLSLETGSLKLANGRVIEKTLYNRRTRQDEPALFVALTFERREVLDSSNIKPMNLIGVDRGENIPAVIALTDPEGCPLSRFKDSLGNPTHILRIGERYKEKQRTIQAKKEVEQRRAGGYSRKYASKAKNLADDMVRNTARDLLYYAVTQDAMLIFENLSRGFGRQGKRTFMAERQYTRMEDWLTAKLAYEGLPSKTYLSKTLAQYTSKTCSNCGFTITSADYDRVLEKLKKTATGWMTTINGKELKVEGQITYYNRYKRQNVVKDLSVELDRLSEESVNNDISSWTKGRSGEALSLLKKRFSHRPVQEKFVCLNCGFETHADEQAALNIARSWLFLRSQEYKKYQTNKTTGNTDKRAFVETWQSFYRKKLKEVWKPAV

SEQ ID NO: 49597 - protein, 978 aa, synthetic construct
  REGION 1..978: note = engineered CasX variant
QEIKRINKIRRRLVKDSNTKKAGKTGPMKTLLVRVMTPDLRERLENLRKKPENIPQPISNTSRANLNKLLTDYTEMKKAILHVYWEEFQKDPVGLMSRVAQPASKKIDQNKLKPEMDEKGNLTTAGFACSQCGQPLFVYKLEQVSEKGKAYTNYFGRCNVAEHEKLILLAQLKPEKDSDEAVTYSLGKFGQRALDFYSIHVTKESTHPVKPLAQIAGNRYASGPVGKALRDACMGTIASFLSKYQDIIIEHQKVVKGNQKRLESLRELAGKENLEYPSVTLPPQPHTKEGVDAYNEVIARVRMWVNLNLWQKLKLSRDDAKPLLRLKGFPSFPLVERQANEVDWWDMVCNVKKLINEKKEDGKVFWQNLAGYKRQEALRPYLSSEEDRKKGKKFARYQLGDLLLHLEKKHGEDWGKVYDEAWERIDKKVEGLSKHIKLEEERRSEDAQSKAALTDWLRAKASFVIEGKKEADKDEFCRCELKLQKWYGDLRGKPFAIEAENSILDISGFSKQYNCAFIWQKDGVKKLNLYLIINYFKGGKLRFKKIKPEAFEANRFYTVINKKSGEIVPMEVNFNFDDPNLIILPLAFGKRQGREFIWNDLLSLETGSLKLANGRVIEKTLYNRRTRQDEPALFVALTFERREVLDSSNIKPMNLIGVDRGENIPAVIALTDPEGCPLSRFKDSLGNPTHILRIGERYKEKQRTIQAKKEVEQRRAGGYSRKYASKAKNLADDMVRNTARDLLYYAVTQDAMLIFENLSRGFGRQGKRTFMAERQYTRMEDWLTAKLAYEGLPSKTYLSKTLAQYTSKTCSNCGFTITSADYDRVLEKLKKTATGWMTTINGKELKVEGQITYYNRYKRQNVVKDLSVELDRLSEESVNNDISSWTKGRSGEALSLLKKRFSHRPVQEKFVCLNCGFETHADEQAALNIARSWLFLRSQEYKKYQTNKTTGNTDKRAFVETWQSFYRKKLKEVWKPAV

SEQ ID NO: 49598 - protein, 978 aa, synthetic construct
  REGION 1..978: note = engineered CasX variant
QEIKRINKIRRRLVKDSNTKKAGKTGPMKTLLVRVMTPDLRERLENLRKKPENIPQPISNTSRANLNKLLTDYTEMKKAILHVYWEEFQKDPVGLMSRVAQPASKKIDQNKLKPEMDEKGNLTTAGFACSQCGQPLFVYKLEQVSEKGKAYTNYFGRCNVAEHEKLILLAQLKPEKDSDEAVTYSLGKFGQRALDFYSIHVTKESTHPVKPLAQIAGNRYASGPVGKALRDACMGTIASFLSKYQDIIIEHQKVVKGNQKRLESLRELAGKENLEYPSVTLPPQPHTKEGVDAYNEVIARVRMWVNLNLWQKLKLSRDDAKPLLRLKGFPSFPLVERQANEVDWWDMVCNVKKLINEKKEDGKVFWQNLAGYKRQEALRPYLSSEEDRKKGKKFARYQLGDLLLHLEKKHGEDWGKVYDEAWERIDKKVEGLSKHIKLEEERRSEDAQSKAALTDWLRAKASFVIEGSKEADKDEFCRCELKLQKWYGDLRGKPFAIEAENSILDISGFSKQYNCAFIWQKDGVKKLNLYLIINYFKGGKLRFKKIKPEAFEANRFYTVINKKSGEIVPMEVNFNFDDPNLIILPLAFGKRQGREFIWNDLLSLETGSLKLANGRVIEKTLYNRRTRQDEPALFVALTFERREVLDSSNIKPMNLIGVDRGENIPAVIALTDPEGCPLSRFKDSLGNPTHILRIGERYKEKQRTIQAKKEVEQRRAGGYSRKYASKAKNLADDMVRNTARDLLYYAVTQDAMLIFENLSRGFGRQGKRTFMAERQYTRMEDWLTAKLAYEGLPSKTYLSKTLAQYTSKTCSNCGFTITSADYDRVLEKLKKTATGWMTTINGKELKVEGQITYYNRYKRQNVVKDLSVELDRLSEESVNNDISSWTKGRSGEALSLLKKRFSHRPVQEKFVCLNCGFETHADEQAALNIARSWLFLRSQEYKKYQTNKTTGNTDKRAFVETWQSFYRKKLKEVWKPAV

SEQ ID NO: 49599 - protein, 979 aa, synthetic construct
  REGION 1..979: note = engineered CasX variant
QEIKRINKIRRRLVKDSNTKKAGKTGPMKTLLVRVMTPDLRERLENLRKKPENIPQPISNTSRANLNKLLTDYTEMKKAILHVYWEEFQKDPVGLMSRVAQPASKKIDQNKLKPEMDEKGNLTTAGFACSQCGQPLFVYKLEQVSEKGKAYTNYFGRCNVAEHEKLILLAQLKPEKDSDEAVTYSLGKFGQRALDFYSIHVTKESTHPVKPLAQIAGNRYASGPVGKALRDACMGTIASFLSKYQDIIIEHQKVVKGNQKRLESLRELAGKENLEYPSVTLPPQPHTKEGVDAYNEVIARVRMWVNLNLWQKLKLSRDDAKPLLRLKGFPSFPLVERQANEVDWWDMVCNVKKLINEKKEDGKVFWQNLAGYKRQEALRPYLSSEEDRKKGKKFARYQLGDLLLHLEKKHGEDWGKVYDEAWERIDKKVEGLSKHIKLEEERRSEDAQSKAALTDWLRAKASFVIEGLKEADDKDEFCRCELKLQKWYGDLRGKPFAIEAENSILDISGFSKQYNCAFIWQKDGVKKLNLYLIINYFKGGKLRFKKIKPEAFEANRFYTVINKKSGEIVPMEVNFNFDDPNLIILPLAFGKRQGREFIWNDLLSLETGSLKLANGRVIEKTLYNRRTRQDEPALFVALTFERREVLDSSNIKPMNLIGVDRGENIPAVIALTDPEGCPLSRFKDSLGNPTHILRIGERYKEKQRTIQAKKEVEQRRAGGYSRKYASKAKNLADDMVRNTARDLLYYAVTQDAMLIFENLSRGFGRQGKRTFMAERQYTRMEDWLTAKLAYEGLPSKTYLSKTLAQYTSKTCSNCGFTITSADYDRVLEKLKKTATGWMTTINGKELKVEGQITYYNRYKRQNVVKDLSVELDRLSEESVNNDISSWTKGRSGEALSLLKKRFSHRPVQEKFVCLNCGFETHADEQAALNIARSWLFLRSQEYKKYQTNKTTGNTDKRAFVETWQSFYRKKLKEVWKPAV

SEQ ID NO: 49600 - protein, 979 aa, synthetic construct
  REGION 1..979: note = engineered CasX variant
QEIKRINKIRRRLVKDSNTKKAGKTGPMKTLLVRVMTPDLRERLENLRKKPENIPQPISNTSRANLNKLLTDYTEMKKAILHVYWEEFQKDPVGLMSRVAQPASKKIDQNKLKPEMDEKGNLTTAGFACSQCGQPLFVYKLEQVSEKGKAYTNYFGRCNVAEHEKLILLAQLKPEKDSDEAVTYSLGKFGQRALDFYSIHVTKESTHPVKPLAQIAGNRYASGPVGKALRDACMGTIASFLSKYQDIIIEHQKVVKGNQKRLESLRELAGKENLEYPSVTLPPQPHTKEGVDAYNEVIARVRMWVNLNLWQKLKLSRDDAKPLLRLKGFPSFPLVERQANEVDWWDMVCNVKKLINEKKEDGKVFWQNLAGYKRQEALRPYLSSEEDRKKGKKFARYQLGDLLLHLEKKHGEDWGKVYDEAWERIDKKVEGLSKHIKLEEERRSEDAQSKAALTDWLRAKASFVIEGLKEADKDEFCRCELKLQKWYGDLRGKPFAIEAENSILDISGFSKQYNCAFIWQKDGVKKLNLYLIINYFKGGKLRFKKIKPEAFEANRFYTVINKKSGEIVPMEVNFNFDDPNLIILPLAFGKRQGREFIWNDLLSLETGSLKLANGRVIEKTLYNRRTRQDEPALFVALTFERREVLDSSNIKPMNLIGVDRGENIPAVIALTDPEGCPLSRFKDSLGNPTHILRIGERYKEKQRTIQAKKEVEQRRAGGYSRKYASKAKNLADDMVRNTARDLLYYAVTQDAMLIFENLSRGFGRQGKRTFMAERQYTRMEDWLTAKLAYEGLPSKTYLSKTLAQYTSKTCSNCGFTITSADYDRVLEKLKKTATGWMTTINGKELKVEGQITYYNRYKRQNVVKDLSVELDRLSEESVNNDISSWTKGRSGNEALSLLKKRFSHRPVQEKFVCLNCGFETHADEQAALNIARSWLFLRSQEYKKYQTNKTTGNTDKRAFVETWQSFYRKKLKEVWKPAV

SEQ ID NO: 49601 - protein, 978 aa, synthetic construct
  REGION 1..978: note = engineered CasX variant
QEIKRINKIRRRLVKDSNTKKAGKTGPMKTLLVRVMTPDLRERLENLRKKPENIPQPISNTSRANLNKLLTDYTEMKKAILHVYWEEFQKDPVGLMSRVAQPASKKIDQNKLKPEMDEKGNLTTAGFACSQCGQPLFVYKLEQVSEKGKAYTNYFGRCNVAEHEKLILLAQLKPEKDSDEAVTYSLGKFGQRALDFYSIHVTKESTHPVKPLAQIAGNRYASGPVGKALRDACMGTIASFLSKYQDIIIEHQKVVKGNQKRLESLRELAGKENLEYPSVTLPPQPHTKEGVDAYNEVIARVRMWVNLNLWQKLKLSRDDAKPLLRLKGFPSFPLVERQANEVDWWDMVCNVKKLINEKKEDGKVFWQNLAGYKRQEALRPYLSSEEDRQKGKKFARYQLGDLLLHLEKKHGEDWGKVYDEAWERIDKKVEGLSKHIKLEEERRSEDAQSKAALTDWLRAKASFVIEGLKEADKDEFCRCELKLQKWYGDLRGKPFAIEAENSILDISGFSKQYNCAFIWQKDGVKKLNLYLIINYFKGGKLRFKKIKPEAFEANRFYTVINKKSGEIVPMEVNFNFDDPNLIILPLAFGKRQGREFIWNDLLSLETGSLKLANGRVIEKTLYNRRTRQDEPALFVALTFERREVLDSSNIKPMNLIGVDRGENIPAVIALTDPEGCPLSRFKDSLGNPTHILRIGERYKEKQRTIQAKKEVEQRRAGGYSRKYASKAKNLADDMVRNTARDLLYYAVTQDAMLIFENLSRGFGRQGKRTFMAERQYTRMEDWLTAKLAYEGLPSKTYLSKTLAQYTSKTCSNCGFTITSADYDRVLEKLKKTATGWMTTINGKELKVEGQITYYNRYKRQNVVKDLSVELDRLSEESVNNDISSWTKGRSGEALSLLKKRFSHRPVQEKFVCLNCGFETHADEQAALNIARSWLFLRSQEYKKYQTNKTTGNTDKRAFVETWQSFYRKKLKEVWKPAV

SEQ ID NO: 49602 - protein, 978 aa, synthetic construct
  REGION 1..978: note = engineered CasX variant
QEIKRINKIRRRLVKDSNTKKAGKTGPMKTLLVRVMTPDLRERLENLRKKPENIPQPISNTSRANLNKLLTDYTEMKKAILHVYWEEFQKDPVGLMSRVAQPASKKIDQNKLKPEMDEKGNLTTAGFACSQCGQPLFVYKLEQVSEKGKAYTNYFGRCNVAEHEKLILLAQLKPEKDSDEAVTYSLGKFGQRALDFYSIHVTKESTHPVKPLAQIAGNRYASGPVGKALRDACMGTIASFLSKYQDIIIEHQKVVKGNQKRLESLRELAGKENLEYPSVTLPPQPHTKEGVDAYNEVIARVRMWVNLNLWQKLKLSRDDAKPLLRLKGFPSFPLVERQANEVDWWDMVCNVKKLINEKKEDGKVFWQNLAGYKRQEALRPYLSSEEDRKKGKKFARYQLGDLLLHLEKKHGEDWGKVYDEAWERIDKKVEGLSKHIKLEEERRSEDAQSKAALTDWLRAKASFVIEGLKEADKDEFCRCELKLQKWYGDLRGKPFAIEAENSILDISGFSKQYNCAFIWQKDGVKKLNLYLIINYFKGGKLRFKKIKPEAFEANRFYTVINKKSGEIVPMEVNFNFDDPNLIILPLAFGKRQGREFIWNDLLSLETGSLKLANGRVIEKTLYNRRTRQDEPALFVALTFERREVLDSSNIKPMNLIGVDRGENIPAVIALTDPEGCPLSRFKDSLGNPTHILRIGERYKEKQRTIQAKKEVEQRRAGGYSRKYASKAKNLADDMVRNTARDLLYYAVTQDAMLIFENLSRGFGRQGKRTFMAERQYTRMEDWLTAKLAYEGLPSQTYLSKTLAQYTSKTCSNCGFTITSADYDRVLEKLKKTATGWMTTINGKELKVEGQITYYNRYKRQNVVKDLSVELDRLSEESVNNDISSWTKGRSGEALSLLKKRFSHRPVQEKFVCLNCGFETHADEQAALNIARSWLFLRSQEYKKYQTNKTTGNTDKRAFVETWQSFYRKKLKEVWKPAV

SEQ ID NO: 49603 - protein, 978 aa, synthetic construct
  REGION 1..978: note = engineered CasX variant
QEIKRINKIRRRLVKDSNTKKAGKTGPMKTLLVRVMTPDLRERLENLRKKPENIPQPISNTSRANLNKLLTDYTEMKKAILHVYWEEFQKDPVGLMSRVAQPASKKIDQNKLKPEMDEKGNLTTAGFACSQCGQPLFVYKLEQVSEKGKAYTNYFGRCNVAEHEKLILLAQLKPEKDSDEAVTYSLGKFGQRALDFYSIHVTKESTHPVKPLAQIAGNRYASGPVGKALRDACMGTIASFLSKYQDIIIEHQKVVKGNQKRLESLRELAGKENLEYPSVTLPPQPHTKEGVDAYNEVIARVRMWVNLNLWQKLKLSRDDAKPLLRLKGFPSFPLVERQANEVDWWDMVCNVKKLINEKKEDGKVFWQNLAGYKRQEALRPYLSSEEDRKKGKKFARYQLGDLLLHLEKKHGEDWGKVYDEAWERIDKKVEGLSKHIKLEEERRSEDAQSKAALTDWLRAKASFVIEGLKEADKDEFCRCELKLQKWYGDLRGKPFAIEAENSILDISGFSKQYNCAFIWQKDGVKKLNLYLIINYFKGGKLRFKKIKPEAFEANRFYTVINKKSGEIVPMEVNFNFDDPNLIILPLAFGKRQGREFIWNDLLSLETGSLKLANGRVIEKTLYNRRTRQDEPALFVALTFERREVLDSSNIKPMNLIGVDRGENIPAVIALTDPEGCPLSRFKDSLGNPTHILRIGERYKEKQRTIQAKKEVEQRRAGGYSRKYASKAKNLADDMVRNTARDLLYYAVTQDAMLIFENLSRGFGRQGKRTFMAERQYTRMEDWLTAKLAYNGLPSKTYLSKTLAQYTSKTCSNCGFTITSADYDRVLEKLKKTATGWMTTINGKELKVEGQITYYNRYKRQNVVKDLSVELDRLSEESVNNDISSWTKGRSGEALSLLKKRFSHRPVQEKFVCLNCGFETHADEQAALNIARSWLFLRSQEYKKYQTNKTTGNTDKRAFVETWQSFYRKKLKEVWKPAV

SEQ ID NO: 49604 - protein, 978 aa, synthetic construct
  REGION 1..978: note = engineered CasX variant
QEIKRINKIRRRLVKDSNTKKAGKTGPMKTLLVRVMTPDLRERLENLRKKPENIPQPISNTSRANLNKLLTDYTEMKKAILHVYWEEFQKDPVGLMSRVAQPASKKIDQNKLKPEMDEKGNLTTAGFACSQCGQPLFVYKLEQVSEKGKAYTNYFGRCNVAEHEKLIQLAQLKPEKDSDEAVTYSLGKFGQRALDFYSIHVTKESTHPVKPLAQIAGNRYASGPVGKALRDACMGTIASFLSKYQDIIIEHQKVVKGNQKRLESLRELAGKENLEYPSVTLPPQPHTKEGVDAYNEVIARVRMWVNLNLWQKLKLSRDDAKPLLRLKGFPSFPLVERQANEVDWWDMVCNVKKLINEKKEDGKVFWQNLAGYKRQEALRPYLSSEEDRKKGKKFARYQLGDLLLHLEKKHGEDWGKVYDEAWERIDKKVEGLSKHIKLEEERRSEDAQSKAALTDWLRAKASFVIEGLKEADKDEFCRCELKLQKWYGDLRGKPFAIEAENSILDISGFSKQYNCAFIWQKDGVKKLNLYLIINYFKGGKLRFKKIKPEAFEANRFYTVINKKSGEIVPMEVNFNFDDPNLIILPLAFGKRQGREFIWNDLLSLETGSLKLANGRVIEKTLYNRRTRQDEPALFVALTFERREVLDSSNIKPMNLIGVDRGENIPAVIALTDPEGCPLSRFKDSLGNPTHILRIGERYKEKQRTIQAKKEVEQRRAGGYSRKYASKAKNLADDMVRNTARDLLYYAVTQDAMLIFENLSRGFGRQGKRTFMAERQYTRMEDWLTAKLAYEGLPSKTYLSKTLAQYTSKTCSNCGFTITSADYDRVLEKLKKTATGWMTTINGKELKVEGQITYYNRYKRQNVVKDLSVELDRLSEESVNNDISSWTKGRSGEALSLLKKRFSHRPVQEKFVCLNCGFETHADEQAALNIARSWLFLRSQEYKKYQTNKTTGNTDKRAFVETWQSFYRKKLKEVWKPAV

SEQ ID NO: 49605 - protein, 978 aa, synthetic construct
  REGION 1..978: note = engineered CasX variant
QEIKRINKIRRRLVKDSNTKKAGKTGPMKTLLVRVMTPDLRERLENLRKKPENIPQPISNTSRANLNKLLTDYTEMKKAILHVYWEEFQKDPVGLMSRVAQPASKKIDQNKLKPEMDEKGNLTTAGFACSQCGQPLFVYKLEQVSEKGKAYTNYFGRCNVAEHEKLILLAQLKPEKDSDEAVTYSLGKFGQRALDFYSIHVTKESTHPVKPLAQIAGNRYASGPVGKALRDACMGTIASFLSKYQDIIIEHQKVVKGNQKRLESLRELAGKENLEYPSVTLPPQPHTKEGVDAYNEVIARVRMWVNLNLWQKLKLSRDDAKPLLRLKGFPSFPLVERQANEVDWWDMVCNVKKLINEKKEDGKVFWQNLAIYKRQEALRPYLSSEEDRKKGKKFARYQLGDLLLHLEKKHGEDWGKVYDEAWERIDKKVEGLSKHIKLEEERRSEDAQSKAALTDWLRAKASFVIEGLKEADKDEFCRCELKLQKWYGDLRGKPFAIEAENSILDISGFSKQYNCAFIWQKDGVKKLNLYLIINYFKGGKLRFKKIKPEAFEANRFYTVINKKSGEIVPMEVNFNFDDPNLIILPLAFGKRQGREFIWNDLLSLETGSLKLANGRVIEKTLYNRRTRQDEPALFVALTFERREVLDSSNIKPMNLIGVDRGENIPAVIALTDPEGCPLSRFKDSLGNPTHILRIGERYKEKQRTIQAKKEVEQRRAGGYSRKYASKAKNLADDMVRNTARDLLYYAVTQDAMLIFENLSRGFGRQGKRTFMAERQYTRMEDWLTAKLAYEGLPSKTYLSKTLAQYTSKTCSNCGFTITSADYDRVLEKLKKTATGWMTTINGKELKVEGQITYYNRYKRQNVVKDLSVELDRLSEESVNNDISSWTKGRSGEALSLLKKRFSHRPVQEKFVCLNCGFETHADEQAALNIARSWLFLRSQEYKKYQTNKTTGNTDKRAFVETWQSFYRKKLKEVWKPAV

SEQ ID NO: 49606 - protein, 978 aa, synthetic construct
  REGION 1..978: note = engineered CasX variant
QEIKRINKIRRRLVKDSNTKKAGKTGPMKTLLVRVMTPDLRERLENLRKKPENIPQPISNTSRANLNKLLTDYTEMKKAILHVYWEEFQKDPVGLMSRVAQPASKKIDQNKLKPEMDEKGNLTTAGFACSQCGQPLFVYKLEQVSEKGKAYTNYFGRCNVAEHEKLILLAQLKPEKDSDEAVTYSLGKFGQRALDFYSIHVTKESTHPVKPLAQIAGNRYASGPVGKALRDACMGTIASFLSKYQDIIIEHQKVVKGNQKRLESLRELAGKENLEYPSVTLPPQPHTKEGVDAYNEVIARVRMWVNLNLWQKLKLSRDDAKPLLRLKGFPSFPLVERQANEVDWWDMVCNVKKLINEKKEDGKVFWQNLAGYKRQEALRPYLSSEEDREKGKKFARYQLGDLLLHLEKKHGEDWGKVYDEAWERIDKKVEGLSKHIKLEEERRSEDAQSKAALTDWLRAKASFVIEGLKEADKDEFCRCELKLQKWYGDLRGKPFAIEAENSILDISGFSKQYNCAFIWQKDGVKKLNLYLIINYFKGGKLRFKKIKPEAFEANRFYTVINKKSGEIVPMEVNFNFDDPNLIILPLAFGKRQGREFIWNDLLSLETGSLKLANGRVIEKTLYNRRTRQDEPALFVALTFERREVLDSSNIKPMNLIGVDRGENIPAVIALTDPEGCPLSRFKDSLGNPTHILRIGERYKEKQRTIQAKKEVEQRRAGGYSRKYASKAKNLADDMVRNTARDLLYYAVTQDAMLIFENLSRGFGRQGKRTFMAERQYTRMEDWLTAKLAYEGLPSKTYLSKTLAQYTSKTCSNCGFTITSADYDRVLEKLKKTATGWMTTINGKELKVEGQITYYNRYKRQNVVKDLSVELDRLSEESVNNDISSWTKGRSGEALSLLKKRFSHRPVQEKFVCLNCGFETHADEQAALNIARSWLFLRSQEYKKYQTNKTTGNTDKRAFVETWQSFYRKKLKEVWKPAV

SEQ ID NO: 49607 - protein, 978 aa, synthetic construct
  REGION 1..978: note = engineered CasX variant
QEIKRINKIRRRLVKDSNTKKAGKTGPMKTLLVRVMTPDLRERLENLRKKPENIPQPISNTSRANLNKLLTDYTEMKKAILHVYWEEFQKDPVGLMSRVAQPASKKIDQNKLKPEMDEKGNLTTAGFACSQCGQPLFVYKLEQVSEKGKAYTNYFGRCNVAEHEKLILLAQLKPEKDSDEAVTYSLGKFGQRALDFYSIHVTKESTHPVKPLAQIAGNRYASGPVGKALRDACMGTIASFLSKYQDIIIEHQKVVKGNQKRLESLRELAGKENLEYPSVTLPPQPHTKEGVDAYNEVIARVRMWVNLNLWQKLKLSRDDAKPLLRLKGFPSFPLVERQANEVDWWDMVCNVKKLINEKKEDGKVFWQNLAGYKRQEALRPYLSSEEDRKKGKKFARYQLGDLLLHLEKKHGEDWGKVYDEAWERIDKKVEGLSKHIKLEEERRSEDAQSKAALTDWLRAKASFVIEGLKEADKDEFCRCELKLQKWYGDLRGKPFAIEAENSILDISGFSKQYNCAFIWQKDGVKKLNLYLIINYFKGGKLRFKKIKPEAFEANRFYTVINKKSGEIVIMEVNFNFDDPNLIILPLAFGKRQGREFIWNDLLSLETGSLKLANGRVIEKTLYNRRTRQDEPALFVALTFERREVLDSSNIKPMNLIGVDRGENIPAVIALTDPEGCPLSRFKDSLGNPTHILRIGERYKEKQRTIQAKKEVEQRRAGGYSRKYASKAKNLADDMVRNTARDLLYYAVTQDAMLIFENLSRGFGRQGKRTFMAERQYTRMEDWLTAKLAYEGLPSKTYLSKTLAQYTSKTCSNCGFTITSADYDRVLEKLKKTATGWMTTINGKELKVEGQITYYNRYKRQNVVKDLSVELDRLSEESVNNDISSWTKGRSGEALSLLKKRFSHRPVQEKFVCLNCGFETHADEQAALNIARSWLFLRSQEYKKYQTNKTTGNTDKRAFVETWQSFYRKKLKEVWKPAV

SEQ ID NO: 49608 - protein, 978 aa, synthetic construct
  REGION 1..978: note = engineered CasX variant
QEIKRINKIRRRLVKDSNTKKAGKTGPMKTLLVRVMTPDLRERLENLRKKPENIPQPISNTSRANLNKLLTDYTEMKKAILHVYWEEFQKDPVGLMSRVAQPASKKIDQNKLKPEMDEKGNLTTAGFACSQCGQPLFVYKLEQVSEKGKAYTNYFGRCNVAEHEKLILLAQLKPEKDSDEAVTYSLGKFGQRALDFYSIHVTKESTHPVKPLAQIAGNRYASGPVGKALRGACMGTIASFLSKYQDIIIEHQKVVKGNQKRLESLRELAGKENLEYPSVTLPPQPHTKEGVDAYNEVIARVRMWVNLNLWQKLKLSRDDAKPLLRLKGFPSFPLVERQANEVDWWDMVCNVKKLINEKKEDGKVFWQNLAGYKRQEALRPYLSSEEDRKKGKKFARYQLGDLLLHLEKKHGEDWGKVYDEAWERIDKKVEGLSKHIKLEEERRSEDAQSKAALTDWLRAKASFVIEGLKEADKDEFCRCELKLQKWYGDLRGKPFAIEAENSILDISGFSKQYNCAFIWQKDGVKKLNLYLIINYFKGGKLRFKKIKPEAFEANRFYTVINKKSGEIVPMEVNFNFDDPNLIILPLAFGKRQGREFIWNDLLSLETGSLQLANGRVIEKTLYNRRTRQDEPALFVALTFERREVLDSSNIKPMNLIGVDRGENIPAVIALTDPEGCPLSRFKDSLGNPTHILRIGESYKEKQRTIQAKKEVEQRRAGGYSRKYASKAKNLADDMVRNTARDLLYYAVTQDAMLIFENLSRGFGRQGKRTFMAERQYTRMEDWLTAKLAYEGLPSKTYLSKTLAQYTSKTCSNCGFTITSADYDRVLEKLKKTATGWMTTINGKELKVEGQITYYNRYKRQNVVKDLSVELDRLSEESVNNDISSWTKGRSGEALSLLKKRFSHRPVQEKFVCLNCGFETHADEQAALNIARSWLFLRSQEYKKYQTNKTTGNTDKRAFVETWQSFYRKKLKEVWKPAV

SEQ ID NO: 49609 - protein, 978 aa, synthetic construct
  REGION 1..978: note = engineered CasX variant
QEIKRINKIRRRLVKDSNTKKAGKTGPMKTLLVRVMTPDLRERLENLRKKPENIPQPISNTSRANLNKLLTDYTEMKKAILHVYWEEFQKDPVGLMSRVAQPASKKIDQNKLKPEMDEKGNLTTAGFACSQCGQPLFVYKLEQVSEKGKAYTNYFGRCNVAEHEKLILLAQLKPEKDSDEAVTYSLGKFGQRALDFYSIHVTKESTHPVKPLAQIAGNRYASGPVGKALRDACMGTIASFLSKYQDIIIEHQKVVKGNQKRLESLRELAGKENLEYPSVTLPPQPHTKEGVDAYNEVIARVRMWVNLNLWQKLKLSRDDAKPLLRLKNFPSFPLVERQANEVDWWDMVCNVKKLINEKKEDGKVFWQNLAGYKRQEALRPYLSSEEDRKKGKKFARYQLGDLLLHLEKKHGEDWGKVYDEAWERIDKKVEGLSKHIKLEEERRSEDAQSKAALTDWLRAKASFVIEGLKEADKDEFCRCELKLQKWYGDLRGKPFAIEAENSILDISGFSKQYNCAFIWQKDGVKKLNLYLIINYFKGGKLRFKKIKPEAFEANRFYTVINKKSGEIVPMEVNFNFDDPNLIILPLAFGKRQGREFIWNDLLSLETGSLQLANGRVIEKTLYNRRTRQDEPALFVALTFERREVLDSSNIKPMNLIGVDRGENIPAVIALTDPEGCPLSRFKDSLGNPTHILRIGESYKEKQRTIQAKKEVEQRRAGGYSRKYASKAKNLADDMVRNTARDLLYYAVTQDAMLIFENLSRGFGRQGKRTFMAERQYTRMEDWLTAKLAYEGLPSKTYLSKTLAQYTSKTCSNCGFTITSADYDRVLEKLKKTATGWMTTINGKELKVEGQITYYNRYKRQNVVKDLSVELDRLSEESVNNDISSWTKGRSGEALSLLKKRFSHRPVQEKFVCLNCGFETHADEQAALNIARSWLFLRSQEYKKYQTNKTTGNTDKRAFVETWQSFYRKKLKEVWKPAV

SEQ ID NO: 49610 - protein, 978 aa, synthetic construct
  REGION 1..978: note = engineered CasX variant
QEIKRINKIRRRLVKDSNTKKAGKTGPMKTLLVRVMTPDLRERLENLRKKPENIPQPISNTSRANLNKLLTDYTEMKKAILHVYWEEFQKDPVGLMSRVAQPASKKIDQNKLKPEMDEKGNLTTAGFACSQCGQPLFVYKLEQVSEKGKAYTNYFGRCNVAEHEKLILLAQLKPEKDSDEAVTYSLGKFGQRALDFYSIHVTKESTHPVKPLAQIAGNRYASGPVGKALRDACMGTIASFLSKYQDIIIEHQKVVKGNQKRLESLRELAGKENLEYPSVTLPPQPHTKEGVDAYNEVIARVRMWVNLNLWQKLKLSRDDAKPLLRLKGFPSFPLVERQANEVDWWDMVCNVKKLINEKKEDGKVFWQNLAGYKRQEALRPYLSSEEDRKKGKKFARYQLGDLLNHLEKKHGEDWGKVYDEAWERIDKKVEGLSKHIKLEEERRSEDAQSKAALTDWLRAKASFVIEGLKEADKDEFCRCELKLQKWYGDLRGKPFAIEAENSILDISGFSKQYNCAFIWQKDGVKKLNLYLIINYFKGGKLRFKKIKPEAFEANRFYTVINKKSGEIVPMEVNFNFDDPNLIILPLAFGKRQGREFIWNDLLSLETGSLQLANGRVIEKTLYNRRTRQDEPALFVALTFERREVLDSSNIKPMNLIGVDRGENIPAVIALTDPEGCPLSRFKDSLGNPTHILRIGESYKEKQRTIQAKKEVEQRRAGGYSRKYASKAKNLADDMVRNTARDLLYYAVTQDAMLIFENLSRGFGRQGKRTFMAERQYTRMEDWLTAKLAYEGLPSKTYLSKTLAQYTSKTCSNCGFTITSADYDRVLEKLKKTATGWMTTINGKELKVEGQITYYNRYKRQNVVKDLSVELDRLSEESVNNDISSWTKGRSGEALSLLKKRFSHRPVQEKFVCLNCGFETHADEQAALNIARSWLFLRSQEYKKYQTNKTTGNTDKRAFVETWQSFYRKKLKEVWKPAV

SEQ ID NO: 49611 - protein, 978 aa, synthetic construct
  REGION 1..978: note = engineered CasX variant
QEIKRINKIRRRLVKDSNTKKAGKTGPMKTLLVRVMTPDLRERLENLRKKPENIPQPISNTSRANLNKLLTDYTEMKKAILHVYWEEFQKDPVGLMSRVAQPASKKIDQNKLKPEMDEKGNLTTAGFACSQCGQPLFVYKLEQVSEKGKAYTNYFGRCNVAEHEKLILLAQLKPEKDSDEAVTYSLGKFGQRALDFYSIHVTKESTHPVKPLAQIAGNRYASGPVGKALRDACMGTIASFLSKYQDIIIEHQKVVKGNQKRLESLRELAGKENLEYPSVTLPPQPHTKEGVDAYNEVIARVRMWVNLNLWQKLKLSRDDAKPLLRLKGFPSFPLVERQANEVDWWDMVCNVKKLINEKKEDGKVFWQNLAGYKRQEALRPYLSSEEDRKKGKKFARYQLGDLLWHLEKKHGEDWGKVYDEAWERIDKKVEGLSKHIKLEEERRSEDAQSKAALTDWLRAKASFVIEGLKEADKDEFCRCELKLQKWYGDLRGKPFAIEAENSILDISGFSKQYNCAFIWQKDGVKKLNLYLIINYFKGGKLRFKKIKPEAFEANRFYTVINKKSGEIVPMEVNFNFDDPNLIILPLAFGKRQGREFIWNDLLSLETGSLQLANGRVIEKTLYNRRTRQDEPALFVALTFERREVLDSSNIKPMNLIGVDRGENIPAVIALTDPEGCPLSRFKDSLGNPTHILRIGESYKEKQRTIQAKKEVEQRRAGGYSRKYASKAKNLADDMVRNTARDLLYYAVTQDAMLIFENLSRGFGRQGKRTFMAERQYTRMEDWLTAKLAYEGLPSKTYLSKTLAQYTSKTCSNCGFTITSADYDRVLEKLKKTATGWMTTINGKELKVEGQITYYNRYKRQNVVKDLSVELDRLSEESVNNDISSWTKGRSGEALSLLKKRFSHRPVQEKFVCLNCGFETHADEQAALNIARSWLFLRSQEYKKYQTNKTTGNTDKRAFVETWQSFYRKKLKEVWKPAV

SEQ ID NO: 49612 - protein, 978 aa, synthetic construct
  REGION 1..978: note = engineered CasX variant
QEIKRINKIRRRLVKDSNTKKAGKTGPMKTLLVRVMTPDLRERLENLRKKPENIPQPISNTSRANLNKLLTDYTEMKKAILHVYWEEFQKDPVGLMSRVAQPASKKIDQNKLKPEMDEKGNLTTAGFACSQCGQPLFVYKLEQVSEKGKAYTNYFGRCNVAEHEKLILLAQLKPEKDSDEAVTYSLGKFGQRALDFYSIHVTKESTHPVKPLAQIAGNRYASGPVGKALRDACMGTIASFLSKYQDIIIEHQKVVKGNQKRLESLRELAGKENLEYPSVTLPPQPHTKEGVDAYNEVIARVRMWVNLNLWQKLKLSRDDAKPLLRLKGFPSFPLVERQANEVDWWDMVCNVKKLINEKKEDGKVFWQNLAGYKRQEALRPYLSSEEDRKKGKKFARYQLGDLLLHLYKKHGEDWGKVYDEAWERIDKKVEGLSKHIKLEEERRSEDAQSKAALTDWLRAKASFVIEGLKEADKDEFCRCELKLQKWYGDLRGKPFAIEAENSILDISGFSKQYNCAFIWQKDGVKKLNLYLIINYFKGGKLRFKKIKPEAFEANRFYTVINKKSGEIVPMEVNFNFDDPNLIILPLAFGKRQGREFIWNDLLSLETGSLQLANGRVIEKTLYNRRTRQDEPALFVALTFERREVLDSSNIKPMNLIGVDRGENIPAVIALTDPEGCPLSRFKDSLGNPTHILRIGESYKEKQRTIQAKKEVEQRRAGGYSRKYASKAKNLADDMVRNTARDLLYYAVTQDAMLIFENLSRGFGRQGKRTFMAERQYTRMEDWLTAKLAYEGLPSKTYLSKTLAQYTSKTCSNCGFTITSADYDRVLEKLKKTATGWMTTINGKELKVEGQITYYNRYKRQNVVKDLSVELDRLSEESVNNDISSWTKGRSGEALSLLKKRFSHRPVQEKFVCLNCGFETHADEQAALNIARSWLFLRSQEYKKYQTNKTTGNTDKRAFVETWQSFYRKKLKEVWKPAV

SEQ ID NO: 49613 - protein, 978 aa, synthetic construct
  REGION 1..978: note = engineered CasX variant
QEIKRINKIRRRLVKDSNTKKAGKTGPMKTLLVRVMTPDLRERLENLRKKPENIPQPISNTSRANLNKLLTDYTEMKKAILHVYWEEFQKDPVGLMSRVAQPASKKIDQNKLKPEMDEKGNLTTAGFACSQCGQPLFVYKLEQVSEKGKAYTNYFGRCNVAEHEKLILLAQLKPEKDSDEAVTYSLGKFGQRALDFYSIHVTKESTHPVKPLAQIAGNRYASGPVGKALRDACMGTIASFLSKYQDIIIEHQKVVKGNQKRLESLRELAGKENLEYPSVTLPPQPHTKEGVDAYNEVIARVRMWVNLNLWQKLKLSRDDAKPLLRLKGFPSFPLVERQANEVDWWDMVCNVKKLINEKKEDGKVFWQNLAGYKRQEALRPYLSSEEDRKKGKKFARYQLGDLLLHLEKKHPEDWGKVYDEAWERIDKKVEGLSKHIKLEEERRSEDAQSKAALTDWLRAKASFVIEGLKEADKDEFCRCELKLQKWYGDLRGKPFAIEAENSILDISGFSKQYNCAFIWQKDGVKKLNLYLIINYFKGGKLRFKKIKPEAFEANRFYTVINKKSGEIVPMEVNFNFDDPNLIILPLAFGKRQGREFIWNDLLSLETGSLQLANGRVIEKTLYNRRTRQDEPALFVALTFERREVLDSSNIKPMNLIGVDRGENIPAVIALTDPEGCPLSRFKDSLGNPTHILRIGESYKEKQRTIQAKKEVEQRRAGGYSRKYASKAKNLADDMVRNTARDLLYYAVTQDAMLIFENLSRGFGRQGKRTFMAERQYTRMEDWLTAKLAYEGLPSKTYLSKTLAQYTSKTCSNCGFTITSADYDRVLEKLKKTATGWMTTINGKELKVEGQITYYNRYKRQNVVKDLSVELDRLSEESVNNDISSWTKGRSGEALSLLKKRFSHRPVQEKFVCLNCGFETHADEQAALNIARSWLFLRSQEYKKYQTNKTTGNTDKRAFVETWQSFYRKKLKEVWKPAV

SEQ ID NO: 49614 - protein, 979 aa, synthetic construct
  REGION 1..979: note = engineered CasX variant
QEIKRINKIRRRLVKDSNTKKAGKTGPMKTLLVRVMTPDLRERLENLRKKPENIPQPISNTSRANLNKLLTDYTEMKKAILHVYWEEFQKDPVGLMSRVAQPASKKIDQNKLKPEMDEKGNLTTAGFACSQCGQPLFVYKLEQVSEKGKAYTNYFGRCNVAEHEKLILLAQLKPEKDSDEAVTYSLGKFGQRALDFYSIHVTKESTHPVKPLAQIAGNRYASGPVGKALRDACMGTIASFLSKYQDIIIEHQKVVKGNQKRLESLRELAGKENLEYPSVTLPPQPHTKEGVDAYNEVIARVRMWVNLNLWQKLKLSRDDAKPLLRLKGFPSFPLVERQANEVDWWDMVCNVKKLINEKKEDGKVFWQNLAGYKRQEALRPYLSSEEDRKKGKKFARYQLGDLLLHLEKKHGERDWGKVYDEAWERIDKKVEGLSKHIKLEEERRSEDAQSKAALTDWLRAKASFVIEGLKEADKDEFCRCELKLQKWYGDLRGKPFAIEAENSILDISGFSKQYNCAFIWQKDGVKKLNLYLIINYFKGGKLRFKKIKPEAFEANRFYTVINKKSGEIVPMEVNFNFDDPNLIILPLAFGKRQGREFIWNDLLSLETGSLQLANGRVIEKTLYNRRTRQDEPALFVALTFERREVLDSSNIKPMNLIGVDRGENIPAVIALTDPEGCPLSRFKDSLGNPTHILRIGESYKEKQRTIQAKKEVEQRRAGGYSRKYASKAKNLADDMVRNTARDLLYYAVTQDAMLIFENLSRGFGRQGKRTFMAERQYTRMEDWLTAKLAYEGLPSKTYLSKTLAQYTSKTCSNCGFTITSADYDRVLEKLKKTATGWMTTINGKELKVEGQITYYNRYKRQNVVKDLSVELDRLSEESVNNDISSWTKGRSGEALSLLKKRFSHRPVQEKFVCLNCGFETHADEQAALNIARSWLFLRSQEYKKYQTNKTTGNTDKRAFVETWQSFYRKKLKEVWKPAV

SEQ ID NO: 49615 - protein, 979 aa, synthetic construct
  REGION 1..979: note = engineered CasX variant
QEIKRINKIRRRLVKDSNTKKAGKTGPMKTLLVRVMTPDLRERLENLRKKPENIPQPISNTSRANLNKLLTDYTEMKKAILHVYWEEFQKDPVGLMSRVAQPASKKIDQNKLKPEMDEKGNLTTAGFACSQCGQPLFVYKLEQVSEKGKAYTNYFGRCNVAEHEKLILLAQLKPEKDSDEAVTYSLGKFGQRALDFYSIHVTKESTHPVKPLAQIAGNRYASGPVGKALRDACMGTIASFLSKYQDIIIEHQKVVKGNQKRLESLRELAGKENLEYPSVTLPPQPHTKEGVDAYNEVIARVRMWVNLNLWQKLKLSRDDAKPLLRLKGFPSFPLVERQANEVDWWDMVCNVKKLINEKKEDGKVFWQNLAGYKRQEALRPYLSSEEDRKKGKKFARYQLGDLLLHLEKKHGEYDWGKVYDEAWERIDKKVEGLSKHIKLEEERRSEDAQSKAALTDWLRAKASFVIEGLKEADKDEFCRCELKLQKWYGDLRGKPFAIEAENSILDISGFSKQYNCAFIWQKDGVKKLNLYLIINYFKGGKLRFKKIKPEAFEANRFYTVINKKSGEIVPMEVNFNFDDPNLIILPLAFGKRQGREFIWNDLLSLETGSLQLANGRVIEKTLYNRRTRQDEPALFVALTFERREVLDSSNIKPMNLIGVDRGENIPAVIALTDPEGCPLSRFKDSLGNPTHILRIGESYKEKQRTIQAKKEVEQRRAGGYSRKYASKAKNLADDMVRNTARDLLYYAVTQDAMLIFENLSRGFGRQGKRTFMAERQYTRMEDWLTAKLAYEGLPSKTYLSKTLAQYTSKTCSNCGFTITSADYDRVLEKLKKTATGWMTTINGKELKVEGQITYYNRYKRQNVVKDLSVELDRLSEESVNNDISSWTKGRSGEALSLLKKRFSHRPVQEKFVCLNCGFETHADEQAALNIARSWLFLRSQEYKKYQTNKTTGNTDKRAFVETWQSFYRKKLKEVWKPAV

SEQ ID NO: 49616 - protein, 978 aa, synthetic construct
  REGION 1..978: note = engineered CasX variant
QEIKRINKIRRRLVKDSNTKKAGKTGPMKTLLVRVMTPDLRERLENLRKKPENIPQPISNTSRANLNKLLTDYTEMKKAILHVYWEEFQKDPVGLMSRVAQPASKKIDQNKLKPEMDEKGNLTTAGFACSQCGQPLFVYKLEQVSEKGKAYTNYFGRCNVAEHEKLILLAQLKPEKDSDEAVTYSLGKFGQRALDFYSIHVTKESTHPVKPLAQIAGNRYASGPVGKALRDACMGTIASFLSKYQDIIIEHQKVVKGNQKRLESLRELAGKENLEYPSVTLPPQPHTKEGVDAYNEVIARVRMWVNLNLWQKLKLSRDDAKPLLRLKGFPSFPLVERQANEVDWWDMVCNVKKLINEKKEDGKVFWQNLAGYKRQEALRPYLSSEEDRKKGKKFARYQLGDLLLHLEKKHGEDWGDVYDEAWERIDKKVEGLSKHIKLEEERRSEDAQSKAALTDWLRAKASFVIEGLKEADKDEFCRCELKLQKWYGDLRGKPFAIEAENSILDISGFSKQYNCAFIWQKDGVKKLNLYLIINYFKGGKLRFKKIKPEAFEANRFYTVINKKSGEIVPMEVNFNFDDPNLIILPLAFGKRQGREFIWNDLLSLETGSLQLANGRVIEKTLYNRRTRQDEPALFVALTFERREVLDSSNIKPMNLIGVDRGENIPAVIALTDPEGCPLSRFKDSLGNPTHILRIGESYKEKQRTIQAKKEVEQRRAGGYSRKYASKAKNLADDMVRNTARDLLYYAVTQDAMLIFENLSRGFGRQGKRTFMAERQYTRMEDWLTAKLAYEGLPSKTYLSKTLAQYTSKTCSNCGFTITSADYDRVLEKLKKTATGWMTTINGKELKVEGQITYYNRYKRQNVVKDLSVELDRLSEESVNNDISSWTKGRSGEALSLLKKRFSHRPVQEKFVCLNCGFETHADEQAALNIARSWLFLRSQEYKKYQTNKTTGNTDKRAFVETWQSFYRKKLKEVWKPAV

SEQ ID NO: 49617 - protein, 978 aa, synthetic construct
  REGION 1..978: note = engineered CasX variant
QEIKRINKIRRRLVKDSNTKKAGKTGPMKTLLVRVMTPDLRERLENLRKKPENIPQPISNTSRANLNKLLTDYTEMKKAILHVYWEEFQKDPVGLMSRVAQPASKKIDQNKLKPEMDEKGNLTTAGFACSQCGQPLFVYKLEQVSEKGKAYTNYFGRCNVAEHEKLILLAQLKPEKDSDEAVTYSLGKFGQRALDFYSIHVTKESTHPVKPLAQIAGNRYASGPVGKALRDACMGTIASFLSKYQDIIIEHQKVVKGNQKRLESLRELAGKENLEYPSVTLPPQPHTKEGVDAYNEVIARVRMWVNLNLWQKLKLSRDDAKPLLRLKGFPSFPLVERQANEVDWWDMVCNVKKLINEKKEDGKVFWQNLAGYKRQEALRPYLSSEEDRKKGKKFARYQLGDLLLHLEKKHGEDWGKVYGEAWERIDKKVEGLSKHIKLEEERRSEDAQSKAALTDWLRAKASFVIEGLKEADKDEFCRCELKLQKWYGDLRGKPFAIEAENSILDISGFSKQYNCAFIWQKDGVKKLNLYLIINYFKGGKLRFKKIKPEAFEANRFYTVINKKSGEIVPMEVNFNFDDPNLIILPLAFGKRQGREFIWNDLLSLETGSLQLANGRVIEKTLYNRRTRQDEPALFVALTFERREVLDSSNIKPMNLIGVDRGENIPAVIALTDPEGCPLSRFKDSLGNPTHILRIGESYKEKQRTIQAKKEVEQRRAGGYSRKYASKAKNLADDMVRNTARDLLYYAVTQDAMLIFENLSRGFGRQGKRTFMAERQYTRMEDWLTAKLAYEGLPSKTYLSKTLAQYTSKTCSNCGFTITSADYDRVLEKLKKTATGWMTTINGKELKVEGQITYYNRYKRQNVVKDLSVELDRLSEESVNNDISSWTKGRSGEALSLLKKRFSHRPVQEKFVCLNCGFETHADEQAALNIARSWLFLRSQEYKKYQTNKTTGNTDKRAFVETWQSFYRKKLKEVWKPAV

SEQ ID NO: 49618 - protein, 978 aa, synthetic construct
  REGION 1..978: note = engineered CasX variant
QEIKRINKIRRRLVKDSNTKKAGKTGPMKTLLVRVMTPDLRERLENLRKKPENIPQPISNTSRANLNKLLTDYTEMKKAILHVYWEEFQKDPVGLMSRVAQPASKKIDQNKLKPEMDEKGNLTTAGFACSQCGQPLFVYKLEQVSEKGKAYTNYFGRCNVAEHEKLILLAQLKPEKDSDEAVTYSLGKFGQRALDFYSIHVTKESTHPVKPLAQIAGNRYASGPVGKALRDACMGTIASFLSKYQDIIIEHQKVVKGNQKRLESLRELAGKENLEYPSVTLPPQPHTKEGVDAYNEVIARVRMWVNLNLWQKLKLSRDDAKPLLRLKGFPSFPLVERQANEVDWWDMVCNVKKLINEKKEDGKVFWQNLAGYKRQEALRPYLSSEEDRKKGKKFARYQLGDLLLHLEKKHGEDWGKVYDEAWERIDKKVEGLSKHIKLEEERRSEDAQSKAALTDWLRAKASFVIEGKKEADKDEFCRCELKLQKWYGDLRGKPFAIEAENSILDISGFSKQYNCAFIWQKDGVKKLNLYLIINYFKGGKLRFKKIKPEAFEANRFYTVINKKSGEIVPMEVNFNFDDPNLIILPLAFGKRQGREFIWNDLLSLETGSLQLANGRVIEKTLYNRRTRQDEPALFVALTFERREVLDSSNIKPMNLIGVDRGENIPAVIALTDPEGCPLSRFKDSLGNPTHILRIGESYKEKQRTIQAKKEVEQRRAGGYSRKYASKAKNLADDMVRNTARDLLYYAVTQDAMLIFENLSRGFGRQGKRTFMAERQYTRMEDWLTAKLAYEGLPSKTYLSKTLAQYTSKTCSNCGFTITSADYDRVLEKLKKTATGWMTTINGKELKVEGQITYYNRYKRQNVVKDLSVELDRLSEESVNNDISSWTKGRSGEALSLLKKRFSHRPVQEKFVCLNCGFETHADEQAALNIARSWLFLRSQEYKKYQTNKTTGNTDKRAFVETWQSFYRKKLKEVWKPAV

SEQ ID NO: 49619 - protein, 978 aa, synthetic construct
  REGION 1..978: note = engineered CasX variant
QEIKRINKIRRRLVKDSNTKKAGKTGPMKTLLVRVMTPDLRERLENLRKKPENIPQPISNTSRANLNKLLTDYTEMKKAILHVYWEEFQKDPVGLMSRVAQPASKKIDQNKLKPEMDEKGNLTTAGFACSQCGQPLFVYKLEQVSEKGKAYTNYFGRCNVAEHEKLILLAQLKPEKDSDEAVTYSLGKFGQRALDFYSIHVTKESTHPVKPLAQIAGNRYASGPVGKALRDACMGTIASFLSKYQDIIIEHQKVVKGNQKRLESLRELAGKENLEYPSVTLPPQPHTKEGVDAYNEVIARVRMWVNLNLWQKLKLSRDDAKPLLRLKGFPSFPLVERQANEVDWWDMVCNVKKLINEKKEDGKVFWQNLAGYKRQEALRPYLSSEEDRKKGKKFARYQLGDLLLHLEKKHGEDWGKVYDEAWERIDKKVEGLSKHIKLEEERRSEDAQSKAALTDWLRAKASFVIEGSKEADKDEFCRCELKLQKWYGDLRGKPFAIEAENSILDISGFSKQYNCAFIWQKDGVKKLNLYLIINYFKGGKLRFKKIKPEAFEANRFYTVINKKSGEIVPMEVNFNFDDPNLIILPLAFGKRQGREFIWNDLLSLETGSLQLANGRVIEKTLYNRRTRQDEPALFVALTFERREVLDSSNIKPMNLIGVDRGENIPAVIALTDPEGCPLSRFKDSLGNPTHILRIGESYKEKQRTIQAKKEVEQRRAGGYSRKYASKAKNLADDMVRNTARDLLYYAVTQDAMLIFENLSRGFGRQGKRTFMAERQYTRMEDWLTAKLAYEGLPSKTYLSKTLAQYTSKTCSNCGFTITSADYDRVLEKLKKTATGWMTTINGKELKVEGQITYYNRYKRQNVVKDLSVELDRLSEESVNNDISSWTKGRSGEALSLLKKRFSHRPVQEKFVCLNCGFETHADEQAALNIARSWLFLRSQEYKKYQTNKTTGNTDKRAFVETWQSFYRKKLKEVWKPAV

SEQ ID NO: 49620 - protein, 979 aa, synthetic construct
  REGION 1..979: note = engineered CasX variant
QEIKRINKIRRRLVKDSNTKKAGKTGPMKTLLVRVMTPDLRERLENLRKKPENIPQPISNTSRANLNKLLTDYTEMKKAILHVYWEEFQKDPVGLMSRVAQPASKKIDQNKLKPEMDEKGNLTTAGFACSQCGQPLFVYKLEQVSEKGKAYTNYFGRCNVAEHEKLILLAQLKPEKDSDEAVTYSLGKFGQRALDFYSIHVTKESTHPVKPLAQIAGNRYASGPVGKALRDACMGTIASFLSKYQDIIIEHQKVVKGNQKRLESLRELAGKENLEYPSVTLPPQPHTKEGVDAYNEVIARVRMWVNLNLWQKLKLSRDDAKPLLRLKGFPSFPLVERQANEVDWWDMVCNVKKLINEKKEDGKVFWQNLAGYKRQEALRPYLSSEEDRKKGKKFARYQLGDLLLHLEKKHGEDWGKVYDEAWERIDKKVEGLSKHIKLEEERRSEDAQSKAALTDWLRAKASFVIEGLKEADDKDEFCRCELKLQKWYGDLRGKPFAIEAENSILDISGFSKQYNCAFIWQKDGVKKLNLYLIINYFKGGKLRFKKIKPEAFEANRFYTVINKKSGEIVPMEVNFNFDDPNLIILPLAFGKRQGREFIWNDLLSLETGSLQLANGRVIEKTLYNRRTRQDEPALFVALTFERREVLDSSNIKPMNLIGVDRGENIPAVIALTDPEGCPLSRFKDSLGNPTHILRIGESYKEKQRTIQAKKEVEQRRAGGYSRKYASKAKNLADDMVRNTARDLLYYAVTQDAMLIFENLSRGFGRQGKRTFMAERQYTRMEDWLTAKLAYEGLPSKTYLSKTLAQYTSKTCSNCGFTITSADYDRVLEKLKKTATGWMTTINGKELKVEGQITYYNRYKRQNVVKDLSVELDRLSEESVNNDISSWTKGRSGEALSLLKKRFSHRPVQEKFVCLNCGFETHADEQAALNIARSWLFLRSQEYKKYQTNKTTGNTDKRAFVETWQSFYRKKLKEVWKPAV

SEQ ID NO: 49621 - protein, 979 aa, synthetic construct
  REGION 1..979: note = engineered CasX variant
QEIKRINKIRRRLVKDSNTKKAGKTGPMKTLLVRVMTPDLRERLENLRKKPENIPQPISNTSRANLNKLLTDYTEMKKAILHVYWEEFQKDPVGLMSRVAQPASKKIDQNKLKPEMDEKGNLTTAGFACSQCGQPLFVYKLEQVSEKGKAYTNYFGRCNVAEHEKLILLAQLKPEKDSDEAVTYSLGKFGQRALDFYSIHVTKESTHPVKPLAQIAGNRYASGPVGKALRDACMGTIASFLSKYQDIIIEHQKVVKGNQKRLESLRELAGKENLEYPSVTLPPQPHTKEGVDAYNEVIARVRMWVNLNLWQKLKLSRDDAKPLLRLKGFPSFPLVERQANEVDWWDMVCNVKKLINEKKEDGKVFWQNLAGYKRQEALRPYLSSEEDRKKGKKFARYQLGDLLLHLEKKHGEDWGKVYDEAWERIDKKVEGLSKHIKLEEERRSEDAQSKAALTDWLRAKASFVIEGLKEADKDEFCRCELKLQKWYGDLRGKPFAIEAENSILDISGFSKQYNCAFIWQKDGVKKLNLYLIINYFKGGKLRFKKIKPEAFEANRFYTVINKKSGEIVPMEVNFNFDDPNLIILPLAFGKRQGREFIWNDLLSLETGSLQLANGRVIEKTLYNRRTRQDEPALFVALTFERREVLDSSNIKPMNLIGVDRGENIPAVIALTDPEGCPLSRFKDSLGNPTHILRIGESYKEKQRTIQAKKEVEQRRAGGYSRKYASKAKNLADDMVRNTARDLLYYAVTQDAMLIFENLSRGFGRQGKRTFMAERQYTRMEDWLTAKLAYEGLPSKTYLSKTLAQYTSKTCSNCGFTITSADYDRVLEKLKKTATGWMTTINGKELKVEGQITYYNRYKRQNVVKDLSVELDRLSEESVNNDISSWTKGRSGNEALSLLKKRFSHRPVQEKFVCLNCGFETHADEQAALNIARSWLFLRSQEYKKYQTNKTTGNTDKRAFVETWQSFYRKKLKEVWKPAV

SEQ ID NO: 49622 - protein, 978 aa, synthetic construct
  REGION 1..978: note = engineered CasX variant
QEIKRINKIRRRLVKDSNTKKAGKTGPMKTLLVRVMTPDLRERLENLRKKPENIPQPISNTSRANLNKLLTDYTEMKKAILHVYWEEFQKDPVGLMSRVAQPASKKIDQNKLKPEMDEKGNLTTAGFACSQCGQPLFVYKLEQVSEKGKAYTNYFGRCNVAEHEKLILLAQLKPEKDSDEAVTYSLGKFGQRALDFYSIHVTKESTHPVKPLAQIAGNRYASGPVGKALRDACMGTIASFLSKYQDIIIEHQKVVKGNQKRLESLRELAGKENLEYPSVTLPPQPHTKEGVDAYNEVIARVRMWVNLNLWQKLKLSRDDAKPLLRLKGFPSFPLVERQANEVDWWDMVCNVKKLINEKKEDGKVFWQNLAGYKRQEALRPYLSSEEDRQKGKKFARYQLGDLLLHLEKKHGEDWGKVYDEAWERIDKKVEGLSKHIKLEEERRSEDAQSKAALTDWLRAKASFVIEGLKEADKDEFCRCELKLQKWYGDLRGKPFAIEAENSILDISGFSKQYNCAFIWQKDGVKKLNLYLIINYFKGGKLRFKKIKPEAFEANRFYTVINKKSGEIVPMEVNFNFDDPNLIILPLAFGKRQGREFIWNDLLSLETGSLQLANGRVIEKTLYNRRTRQDEPALFVALTFERREVLDSSNIKPMNLIGVDRGENIPAVIALTDPEGCPLSRFKDSLGNPTHILRIGESYKEKQRTIQAKKEVEQRRAGGYSRKYASKAKNLADDMVRNTARDLLYYAVTQDAMLIFENLSRGFGRQGKRTFMAERQYTRMEDWLTAKLAYEGLPSKTYLSKTLAQYTSKTCSNCGFTITSADYDRVLEKLKKTATGWMTTINGKELKVEGQITYYNRYKRQNVVKDLSVELDRLSEESVNNDISSWTKGRSGEALSLLKKRFSHRPVQEKFVCLNCGFETHADEQAALNIARSWLFLRSQEYKKYQTNKTTGNTDKRAFVETWQSFYRKKLKEVWKPAV

SEQ ID NO: 49623 - protein, 978 aa, synthetic construct
  REGION 1..978: note = engineered CasX variant
QEIKRINKIRRRLVKDSNTKKAGKTGPMKTLLVRVMTPDLRERLENLRKKPENIPQPISNTSRANLNKLLTDYTEMKKAILHVYWEEFQKDPVGLMSRVAQPASKKIDQNKLKPEMDEKGNLTTAGFACSQCGQPLFVYKLEQVSEKGKAYTNYFGRCNVAEHEKLILLAQLKPEKDSDEAVTYSLGKFGQRALDFYSIHVTKESTHPVKPLAQIAGNRYASGPVGKALRDACMGTIASFLSKYQDIIIEHQKVVKGNQKRLESLRELAGKENLEYPSVTLPPQPHTKEGVDAYNEVIARVRMWVNLNLWQKLKLSRDDAKPLLRLKGFPSFPLVERQANEVDWWDMVCNVKKLINEKKEDGKVFWQNLAGYKRQEALRPYLSSEEDRKKGKKFARYQLGDLLLHLEKKHGEDWGKVYDEAWERIDKKVEGLSKHIKLEEERRSEDAQSKAALTDWLRAKASFVIEGLKEADKDEFCRCELKLQKWYGDLRGKPFAIEAENSILDISGFSKQYNCAFIWQKDGVKKLNLYLIINYFKGGKLRFKKIKPEAFEANRFYTVINKKSGEIVPMEVNFNFDDPNLIILPLAFGKRQGREFIWNDLLSLETGSLQLANGRVIEKTLYNRRTRQDEPALFVALTFERREVLDSSNIKPMNLIGVDRGENIPAVIALTDPEGCPLSRFKDSLGNPTHILRIGESYKEKQRTIQAKKEVEQRRAGGYSRKYASKAKNLADDMVRNTARDLLYYAVTQDAMLIFENLSRGFGRQGKRTFMAERQYTRMEDWLTAKLAYEGLPSQTYLSKTLAQYTSKTCSNCGFTITSADYDRVLEKLKKTATGWMTTINGKELKVEGQITYYNRYKRQNVVKDLSVELDRLSEESVNNDISSWTKGRSGEALSLLKKRFSHRPVQEKFVCLNCGFETHADEQAALNIARSWLFLRSQEYKKYQTNKTTGNTDKRAFVETWQSFYRKKLKEVWKPAV

SEQ ID NO: 49624 - protein, 978 aa, synthetic construct
  REGION 1..978: note = engineered CasX variant
QEIKRINKIRRRLVKDSNTKKAGKTGPMKTLLVRVMTPDLRERLENLRKKPENIPQPISNTSRANLNKLLTDYTEMKKAILHVYWEEFQKDPVGLMSRVAQPASKKIDQNKLKPEMDEKGNLTTAGFACSQCGQPLFVYKLEQVSEKGKAYTNYFGRCNVAEHEKLILLAQLKPEKDSDEAVTYSLGKFGQRALDFYSIHVTKESTHPVKPLAQIAGNRYASGPVGKALRDACMGTIASFLSKYQDIIIEHQKVVKGNQKRLESLRELAGKENLEYPSVTLPPQPHTKEGVDAYNEVIARVRMWVNLNLWQKLKLSRDDAKPLLRLKGFPSFPLVERQANEVDWWDMVCNVKKLINEKKEDGKVFWQNLAGYKRQEALRPYLSSEEDRKKGKKFARYQLGDLLLHLEKKHGEDWGKVYDEAWERIDKKVEGLSKHIKLEEERRSEDAQSKAALTDWLRAKASFVIEGLKEADKDEFCRCELKLQKWYGDLRGKPFAIEAENSILDISGFSKQYNCAFIWQKDGVKKLNLYLIINYFKGGKLRFKKIKPEAFEANRFYTVINKKSGEIVPMEVNFNFDDPNLIILPLAFGKRQGREFIWNDLLSLETGSLQLANGRVIEKTLYNRRTRQDEPALFVALTFERREVLDSSNIKPMNLIGVDRGENIPAVIALTDPEGCPLSRFKDSLGNPTHILRIGESYKEKQRTIQAKKEVEQRRAGGYSRKYASKAKNLADDMVRNTARDLLYYAVTQDAMLIFENLSRGFGRQGKRTFMAERQYTRMEDWLTAKLAYNGLPSKTYLSKTLAQYTSKTCSNCGFTITSADYDRVLEKLKKTATGWMTTINGKELKVEGQITYYNRYKRQNVVKDLSVELDRLSEESVNNDISSWTKGRSGEALSLLKKRFSHRPVQEKFVCLNCGFETHADEQAALNIARSWLFLRSQEYKKYQTNKTTGNTDKRAFVETWQSFYRKKLKEVWKPAV

SEQ ID NO: 49625 - protein, 978 aa, synthetic construct
  REGION 1..978: note = engineered CasX variant
QEIKRINKIRRRLVKDSNTKKAGKTGPMKTLLVRVMTPDLRERLENLRKKPENIPQPISNTSRANLNKLLTDYTEMKKAILHVYWEEFQKDPVGLMSRVAQPASKKIDQNKLKPEMDEKGNLTTAGFACSQCGQPLFVYKLEQVSEKGKAYTNYFGRCNVAEHEKLIQLAQLKPEKDSDEAVTYSLGKFGQRALDFYSIHVTKESTHPVKPLAQIAGNRYASGPVGKALRDACMGTIASFLSKYQDIIIEHQKVVKGNQKRLESLRELAGKENLEYPSVTLPPQPHTKEGVDAYNEVIARVRMWVNLNLWQKLKLSRDDAKPLLRLKGFPSFPLVERQANEVDWWDMVCNVKKLINEKKEDGKVFWQNLAGYKRQEALRPYLSSEEDRKKGKKFARYQLGDLLLHLEKKHGEDWGKVYDEAWERIDKKVEGLSKHIKLEEERRSEDAQSKAALTDWLRAKASFVIEGLKEADKDEFCRCELKLQKWYGDLRGKPFAIEAENSILDISGFSKQYNCAFIWQKDGVKKLNLYLIINYFKGGKLRFKKIKPEAFEANRFYTVINKKSGEIVPMEVNFNFDDPNLIILPLAFGKRQGREFIWNDLLSLETGSLQLANGRVIEKTLYNRRTRQDEPALFVALTFERREVLDSSNIKPMNLIGVDRGENIPAVIALTDPEGCPLSRFKDSLGNPTHILRIGESYKEKQRTIQAKKEVEQRRAGGYSRKYASKAKNLADDMVRNTARDLLYYAVTQDAMLIFENLSRGFGRQGKRTFMAERQYTRMEDWLTAKLAYEGLPSKTYLSKTLAQYTSKTCSNCGFTITSADYDRVLEKLKKTATGWMTTINGKELKVEGQITYYNRYKRQNVVKDLSVELDRLSEESVNNDISSWTKGRSGEALSLLKKRFSHRPVQEKFVCLNCGFETHADEQAALNIARSWLFLRSQEYKKYQTNKTTGNTDKRAFVETWQSFYRKKLKEVWKPAV

SEQ ID NO: 49626 - protein, 978 aa, synthetic construct
  REGION 1..978: note = engineered CasX variant
QEIKRINKIRRRLVKDSNTKKAGKTGPMKTLLVRVMTPDLRERLENLRKKPENIPQPISNTSRANLNKLLTDYTEMKKAILHVYWEEFQKDPVGLMSRVAQPASKKIDQNKLKPEMDEKGNLTTAGFACSQCGQPLFVYKLEQVSEKGKAYTNYFGRCNVAEHEKLILLAQLKPEKDSDEAVTYSLGKFGQRALDFYSIHVTKESTHPVKPLAQIAGNRYASGPVGKALRDACMGTIASFLSKYQDIIIEHQKVVKGNQKRLESLRELAGKENLEYPSVTLPPQPHTKEGVDAYNEVIARVRMWVNLNLWQKLKLSRDDAKPLLRLKGFPSFPLVERQANEVDWWDMVCNVKKLINEKKEDGKVFWQNLAIYKRQEALRPYLSSEEDRKKGKKFARYQLGDLLLHLEKKHGEDWGKVYDEAWERIDKKVEGLSKHIKLEEERRSEDAQSKAALTDWLRAKASFVIEGLKEADKDEFCRCELKLQKWYGDLRGKPFAIEAENSILDISGFSKQYNCAFIWQKDGVKKLNLYLIINYFKGGKLRFKKIKPEAFEANRFYTVINKKSGEIVPMEVNFNFDDPNLIILPLAFGKRQGREFIWNDLLSLETGSLQLANGRVIEKTLYNRRTRQDEPALFVALTFERREVLDSSNIKPMNLIGVDRGENIPAVIALTDPEGCPLSRFKDSLGNPTHILRIGESYKEKQRTIQAKKEVEQRRAGGYSRKYASKAKNLADDMVRNTARDLLYYAVTQDAMLIFENLSRGFGRQGKRTFMAERQYTRMEDWLTAKLAYEGLPSKTYLSKTLAQYTSKTCSNCGFTITSADYDRVLEKLKKTATGWMTTINGKELKVEGQITYYNRYKRQNVVKDLSVELDRLSEESVNNDISSWTKGRSGEALSLLKKRFSHRPVQEKFVCLNCGFETHADEQAALNIARSWLFLRSQEYKKYQTNKTTGNTDKRAFVETWQSFYRKKLKEVWKPAV

SEQ ID NO: 49627 - protein, 978 aa, synthetic construct
  REGION 1..978: note = engineered CasX variant
QEIKRINKIRRRLVKDSNTKKAGKTGPMKTLLVRVMTPDLRERLENLRKKPENIPQPISNTSRANLNKLLTDYTEMKKAILHVYWEEFQKDPVGLMSRVAQPASKKIDQNKLKPEMDEKGNLTTAGFACSQCGQPLFVYKLEQVSEKGKAYTNYFGRCNVAEHEKLILLAQLKPEKDSDEAVTYSLGKFGQRALDFYSIHVTKESTHPVKPLAQIAGNRYASGPVGKALRDACMGTIASFLSKYQDIIIEHQKVVKGNQKRLESLRELAGKENLEYPSVTLPPQPHTKEGVDAYNEVIARVRMWVNLNLWQKLKLSRDDAKPLLRLKGFPSFPLVERQANEVDWWDMVCNVKKLINEKKEDGKVFWQNLAGYKRQEALRPYLSSEEDREKGKKFARYQLGDLLLHLEKKHGEDWGKVYDEAWERIDKKVEGLSKHIKLEEERRSEDAQSKAALTDWLRAKASFVIEGLKEADKDEFCRCELKLQKWYGDLRGKPFAIEAENSILDISGFSKQYNCAFIWQKDGVKKLNLYLIINYFKGGKLRFKKIKPEAFEANRFYTVINKKSGEIVPMEVNFNFDDPNLIILPLAFGKRQGREFIWNDLLSLETGSLQLANGRVIEKTLYNRRTRQDEPALFVALTFERREVLDSSNIKPMNLIGVDRGENIPAVIALTDPEGCPLSRFKDSLGNPTHILRIGESYKEKQRTIQAKKEVEQRRAGGYSRKYASKAKNLADDMVRNTARDLLYYAVTQDAMLIFENLSRGFGRQGKRTFMAERQYTRMEDWLTAKLAYEGLPSKTYLSKTLAQYTSKTCSNCGFTITSADYDRVLEKLKKTATGWMTTINGKELKVEGQITYYNRYKRQNVVKDLSVELDRLSEESVNNDISSWTKGRSGEALSLLKKRFSHRPVQEKFVCLNCGFETHADEQAALNIARSWLFLRSQEYKKYQTNKTTGNTDKRAFVETWQSFYRKKLKEVWKPAV

SEQ ID NO: 49628 - protein, 978 aa, synthetic construct
  REGION 1..978: note = engineered CasX variant
QEIKRINKIRRRLVKDSNTKKAGKTGPMKTLLVRVMTPDLRERLENLRKKPENIPQPISNTSRANLNKLLTDYTEMKKAILHVYWEEFQKDPVGLMSRVAQPASKKIDQNKLKPEMDEKGNLTTAGFACSQCGQPLFVYKLEQVSEKGKAYTNYFGRCNVAEHEKLILLAQLKPEKDSDEAVTYSLGKFGQRALDFYSIHVTKESTHPVKPLAQIAGNRYASGPVGKALRDACMGTIASFLSKYQDIIIEHQKVVKGNQKRLESLRELAGKENLEYPSVTLPPQPHTKEGVDAYNEVIARVRMWVNLNLWQKLKLSRDDAKPLLRLKGFPSFPLVERQANEVDWWDMVCNVKKLINEKKEDGKVFWQNLAGYKRQEALRPYLSSEEDRKKGKKFARYQLGDLLLHLEKKHGEDWGKVYDEAWERIDKKVEGLSKHIKLEEERRSEDAQSKAALTDWLRAKASFVIEGLKEADKDEFCRCELKLQKWYGDLRGKPFAIEAENSILDISGFSKQYNCAFIWQKDGVKKLNLYLIINYFKGGKLRFKKIKPEAFEANRFYTVINKKSGEIVIMEVNFNFDDPNLIILPLAFGKRQGREFIWNDLLSLETGSLQLANGRVIEKTLYNRRTRQDEPALFVALTFERREVLDSSNIKPMNLIGVDRGENIPAVIALTDPEGCPLSRFKDSLGNPTHILRIGESYKEKQRTIQAKKEVEQRRAGGYSRKYASKAKNLADDMVRNTARDLLYYAVTQDAMLIFENLSRGFGRQGKRTFMAERQYTRMEDWLTAKLAYEGLPSKTYLSKTLAQYTSKTCSNCGFTITSADYDRVLEKLKKTATGWMTTINGKELKVEGQITYYNRYKRQNVVKDLSVELDRLSEESVNNDISSWTKGRSGEALSLLKKRFSHRPVQEKFVCLNCGFETHADEQAALNIARSWLFLRSQEYKKYQTNKTTGNTDKRAFVETWQSFYRKKLKEVWKPAV

SEQ ID NO: 49629 - protein, 978 aa, synthetic construct; identical to SEQ ID NO: 496

SEQ ID NO: 49630 - protein, 978 aa, synthetic construct
QEIKRINKIRRRLVKDSNTKKAGKTGPMKTLLVRVMTPDLRERLENLRKKPENIPQPISNTSRANLNKLLTDYTEMKKAILHVYWEEFQKDPVGLMSRVAQPASKKIDQNKLKPEMDEKGNLTTAGFACSQCGQPLFVYKLEQVSEKGKAYTNYFGRCNVAEHEKLILLDQLKPEKDSDEAVTYSLGKFGQRALDFYSIHVTKESTHPVKPLAQIAGNRYASGPVGKALSDACMGTIASFLSKYQDIIIEHQKVVKGNQKRLESLRELAGKENLEYPSVTLPPQPHTKEGVDAYNEVIARVRMWVNLNLWQKLKLSRDDAKPLLRLKGFPSFPLVERQANEVDWWDMVCNVKKLINEKKEDGKVFWQNLAGYKRQEALRPYLSSEEDRKKGKKFARYQLGDLLLHLEKKHGEDWGKVYDEAWERIDKKVEGLSKHIKLEEERRSEDAQSKAALTDWLRAKASFVIEGLKEADKDEFCRCELKLQKWYGDLRGKPFAIEAENSILDISGFSKQYNCAFIWQKDGVKKLNLYLIINYFKGGKLRFKKIKPEAFEANRFYTVINKKSGEIVPMEVNFNFDDPNLIILPLAFGKRQGREFIWNDLLSLETGSLKLANGRVIEKTLYNRRTRQDEPALFVALTFERREVLDSSNIKPMNLIGVDRGENIPAVIALTDPEGCPLSRFKDSLGNPTHILRIGESYKEKQRTIQAKKEVEQRRAGGYSRKYASKAKNLADDMVRNTARDLLYYAVTQDAMLIFENLSRGFGRQGKRTFMAERQYTRMEDWLTAKLAYEGLPSKTYLSKTLAQYTSKTCSNCGFTITSADYDRVLEKLKKTATGWMTTINGKELKVEGQITYYNRYKRQNVVKDLSVELDRLSEESVNNDISSWTKGRSGEALSLLKKRFSHRPVQEKFVCLNCGFETHADEQAALNIARSWLFLRSQEYKKYQTNKTTGNTDKRAFVETWQSFYRKKLKEVWKPAV

SEQ ID NO: 49631 - protein, 978 aa, synthetic construct
QEGKRINKIRRRLVKDSNTKKAGKTGPMKTLLVRVMTPDLRERLENLRKKPENIPQPISNTSRANLNKLLTDYTEMKKAILHVYWEEFQKDPVGLMSRVAQPASKKIDQNKLKPEMDEKGNLTTAGFACSQCGQPLFVYKLEQVSEKGKAYTNYFGRCNVAEHEKLILLAQLKPEKDSDEAVTYSLGKFGQRALDFYSIHVTKESTHPVKPLAQIAGNRYASGPVGKALSDACMGTIASFLSKYQDIIIEHQKVVKGNQKRLESLRELAGKENLEYPSVTLPPQPHTKEGVDAYNEVIARVRMWVNLNLWQKLKLSRDDAKPLLRLKGFPSFPLVERQANEVDWWDMVCNVKKLINEKKEDGKVFWQNLAGYKRQEALRPYLSSEEDRKKGKKFARYQLGDLLLHLEKKHGEDWGKVYDEAWERIDKKVEGLSKHIKLEEERRSEDAQSKAALTDWLRAKASFVIEGLKEADKDEFCRCELKLQKWYGDLRGKPFAIEAENSILDISGFSKQYNCAFIWQKDGVKKLNLYLIINYFKGGKLRFKKIKPEAFEANRFYTVINKKSGEIVPMEVNFNFDDPNLIILPLAFGKRQGREFIWNDLLSLETGSLKLANGRVIEKTLYNRRTRQDEPALFVALTFERREVLDSSNIKPMNLIGVDRGENIPAVIALTDPEGCPLSRFKDSLGNPTHILRIGESYKEKQRTIQAKKEVEQRRAGGYSRKYASKAKNLADDMVRNTARDLLYYAVTQDAMLIFENLSRGFGRQGKRTFMAERQYTRMEDWLTAKLAYEGLPSKTYLSKTLAQYTSKTCSNCGFTITSADYDRVLEKLKKTATGWMTTINGKELKVEGQITYYNRYKRQNVVKDLSVELDRLSEESVNNDISSWTKGRSGEALSLLKKRFSHRPVQEKFVCLNCGFETHADEQAALNIARSWLFLRSQEYKKYQTNKTTGNTDKRAFVETWQSFYRKKLKEVWKPAV

SEQ ID NO: 49632 - protein, 979 aa, synthetic construct
QEIGKRINKIRRRLVKDSNTKKAGKTGPMKTLLVRVMTPDLRERLENLRKKPENIPQPISNTSRANLNKLLTDYTEMKKAILHVYWEEFQKDPVGLMSRVAQPASKKIDQNKLKPEMDEKGNLTTAGFACSQCGQPLFVYKLEQVSEKGKAYTNYFGRCNVAEHEKLILLAQLKPEKDSDEAVTYSLGKFGQRALDFYSIHVTKESTHPVKPLAQIAGNRYASGPVGKALSDACMGTIASFLSKYQDIIIEHQKVVKGNQKRLESLRELAGKENLEYPSVTLPPQPHTKEGVDAYNEVIARVRMWVNLNLWQKLKLSRDDAKPLLRLKGFPSFPLVERQANEVDWWDMVCNVKKLINEKKEDGKVFWQNLAGYKRQEALRPYLSSEEDRKKGKKFARYQLGDLLLHLEKKHGEDWGKVYDEAWERIDKKVEGLSKHIKLEEERRSEDAQSKAALTDWLRAKASFVIEGLKEADKDEFCRCELKLQKWYGDLRGKPFAIEAENSILDISGFSKQYNCAFIWQKDGVKKLNLYLIINYFKGGKLRFKKIKPEAFEANRFYTVINKKSGEIVPMEVNFNFDDPNLIILPLAFGKRQGREFIWNDLLSLETGSLKLANGRVIEKTLYNRRTRQDEPALFVALTFERREVLDSSNIKPMNLIGVDRGENIPAVIALTDPEGCPLSRFKDSLGNPTHILRIGESYKEKQRTIQAKKEVEQRRAGGYSRKYASKAKNLADDMVRNTARDLLYYAVTQDAMLIFENLSRGFGRQGKRTFMAERQYTRMEDWLTAKLAYEGLPSKTYLSKTLAQYTSKTCSNCGFTITSADYDRVLEKLKKTATGWMTTINGKELKVEGQITYYNRYKRQNVVKDLSVELDRLSEESVNNDISSWTKGRSGEALSLLKKRFSHRPVQEKFVCLNCGFETHADEQAALNIARSWLFLRSQEYKKYQTNKTTGNTDKRAFVETWQSFYRKKLKEVWKPAV

SEQ ID NO: 49633 - protein, 978 aa, synthetic construct
QEIGRINKIRRRLVKDSNTKKAGKTGPMKTLLVRVMTPDLRERLENLRKKPENIPQPISNTSRANLNKLLTDYTEMKKAILHVYWEEFQKDPVGLMSRVAQPASKKIDQNKLKPEMDEKGNLTTAGFACSQCGQPLFVYKLEQVSEKGKAYTNYFGRCNVAEHEKLILLAQLKPEKDSDEAVTYSLGKFGQRALDFYSIHVTKESTHPVKPLAQIAGNRYASGPVGKALSDACMGTIASFLSKYQDIIIEHQKVVKGNQKRLESLRELAGKENLEYPSVTLPPQPHTKEGVDAYNEVIARVRMWVNLNLWQKLKLSRDDAKPLLRLKGFPSFPLVERQANEVDWWDMVCNVKKLINEKKEDGKVFWQNLAGYKRQEALRPYLSSEEDRKKGKKFARYQLGDLLLHLEKKHGEDWGKVYDEAWERIDKKVEGLSKHIKLEEERRSEDAQSKAALTDWLRAKASFVIEGLKEADKDEFCRCELKLQKWYGDLRGKPFAIEAENSILDISGFSKQYNCAFIWQKDGVKKLNLYLIINYFKGGKLRFKKIKPEAFEANRFYTVINKKSGEIVPMEVNFNFDDPNLIILPLAFGKRQGREFIWNDLLSLETGSLKLANGRVIEKTLYNRRTRQDEPALFVALTFERREVLDSSNIKPMNLIGVDRGENIPAVIALTDPEGCPLSRFKDSLGNPTHILRIGESYKEKQRTIQAKKEVEQRRAGGYSRKYASKAKNLADDMVRNTARDLLYYAVTQDAMLIFENLSRGFGRQGKRTFMAERQYTRMEDWLTAKLAYEGLPSKTYLSKTLAQYTSKTCSNCGFTITSADYDRVLEKLKKTATGWMTTINGKELKVEGQITYYNRYKRQNVVKDLSVELDRLSEESVNNDISSWTKGRSGEALSLLKKRFSHRPVQEKFVCLNCGFETHADEQAALNIARSWLFLRSQEYKKYQTNKTTGNTDKRAFVETWQSFYRKKLKEVWKPAV

SEQ ID NO: 49634 - protein, 979 aa, synthetic construct
QEIKGRINKIRRRLVKDSNTKKAGKTGPMKTLLVRVMTPDLRERLENLRKKPENIPQPISNTSRANLNKLLTDYTEMKKAILHVYWEEFQKDPVGLMSRVAQPASKKIDQNKLKPEMDEKGNLTTAGFACSQCGQPLFVYKLEQVSEKGKAYTNYFGRCNVAEHEKLILLAQLKPEKDSDEAVTYSLGKFGQRALDFYSIHVTKESTHPVKPLAQIAGNRYASGPVGKALSDACMGTIASFLSKYQDIIIEHQKVVKGNQKRLESLRELAGKENLEYPSVTLPPQPHTKEGVDAYNEVIARVRMWVNLNLWQKLKLSRDDAKPLLRLKGFPSFPLVERQANEVDWWDMVCNVKKLINEKKEDGKVFWQNLAGYKRQEALRPYLSSEEDRKKGKKFARYQLGDLLLHLEKKHGEDWGKVYDEAWERIDKKVEGLSKHIKLEEERRSEDAQSKAALTDWLRAKASFVIEGLKEADKDEFCRCELKLQKWYGDLRGKPFAIEAENSILDISGFSKQYNCAFIWQKDGVKKLNLYLIINYFKGGKLRFKKIKPEAFEANRFYTVINKKSGEIVPMEVNFNFDDPNLIILPLAFGKRQGREFIWNDLLSLETGSLKLANGRVIEKTLYNRRTRQDEPALFVALTFERREVLDSSNIKPMNLIGVDRGENIPAVIALTDPEGCPLSRFKDSLGNPTHILRIGESYKEKQRTIQAKKEVEQRRAGGYSRKYASKAKNLADDMVRNTARDLLYYAVTQDAMLIFENLSRGFGRQGKRTFMAERQYTRMEDWLTAKLAYEGLPSKTYLSKTLAQYTSKTCSNCGFTITSADYDRVLEKLKKTATGWMTTINGKELKVEGQITYYNRYKRQNVVKDLSVELDRLSEESVNNDISSWTKGRSGEALSLLKKRFSHRPVQEKFVCLNCGFETHADEQAALNIARSWLFLRSQEYKKYQTNKTTGNTDKRAFVETWQSFYRKKLKEVWKPAV

SEQ ID NO: 49635 - protein, 978 aa, synthetic construct
QEIKRANKIRRRLVKDSNTKKAGKTGPMKTLLVRVMTPDLRERLENLRKKPENIPQPISNTSRANLNKLLTDYTEMKKAILHVYWEEFQKDPVGLMSRVAQPASKKIDQNKLKPEMDEKGNLTTAGFACSQCGQPLFVYKLEQVSEKGKAYTNYFGRCNVAEHEKLILLAQLKPEKDSDEAVTYSLGKFGQRALDFYSIHVTKESTHPVKPLAQIAGNRYASGPVGKALSDACMGTIASFLSKYQDIIIEHQKVVKGNQKRLESLRELAGKENLEYPSVTLPPQPHTKEGVDAYNEVIARVRMWVNLNLWQKLKLSRDDAKPLLRLKGFPSFPLVERQANEVDWWDMVCNVKKLINEKKEDGKVFWQNLAGYKRQEALRPYLSSEEDRKKGKKFARYQLGDLLLHLEKKHGEDWGKVYDEAWERIDKKVEGLSKHIKLEEERRSEDAQSKAALTDWLRAKASFVIEGLKEADKDEFCRCELKLQKWYGDLRGKPFAIEAENSILDISGFSKQYNCAFIWQKDGVKKLNLYLIINYFKGGKLRFKKIKPEAFEANRFYTVINKKSGEIVPMEVNFNFDDPNLIILPLAFGKRQGREFIWNDLLSLETGSLKLANGRVIEKTLYNRRTRQDEPALFVALTFERREVLDSSNIKPMNLIGVDRGENIPAVIALTDPEGCPLSRFKDSLGNPTHILRIGESYKEKQRTIQAKKEVEQRRAGGYSRKYASKAKNLADDMVRNTARDLLYYAVTQDAMLIFENLSRGFGRQGKRTFMAERQYTRMEDWLTAKLAYEGLPSKTYLSKTLAQYTSKTCSNCGFTITSADYDRVLEKLKKTATGWMTTINGKELKVEGQITYYNRYKRQNVVKDLSVELDRLSEESVNNDISSWTKGRSGEALSLLKKRFSHRPVQEKFVCLNCGFETHADEQAALNIARSWLFLRSQEYKKYQTNKTTGNTDKRAFVETWQSFYRKKLKEVWKPAV

SEQ ID NO: 49636 - protein, 978 aa, synthetic construct
QEIKRISKIRRRLVKDSNTKKAGKTGPMKTLLVRVMTPDLRERLENLRKKPENIPQPISNTSRANLNKLLTDYTEMKKAILHVYWEEFQKDPVGLMSRVAQPASKKIDQNKLKPEMDEKGNLTTAGFACSQCGQPLFVYKLEQVSEKGKAYTNYFGRCNVAEHEKLILLAQLKPEKDSDEAVTYSLGKFGQRALDFYSIHVTKESTHPVKPLAQIAGNRYASGPVGKALSDACMGTIASFLSKYQDIIIEHQKVVKGNQKRLESLRELAGKENLEYPSVTLPPQPHTKEGVDAYNEVIARVRMWVNLNLWQKLKLSRDDAKPLLRLKGFPSFPLVERQANEVDWWDMVCNVKKLINEKKEDGKVFWQNLAGYKRQEALRPYLSSEEDRKKGKKFARYQLGDLLLHLEKKHGEDWGKVYDEAWERIDKKVEGLSKHIKLEEERRSEDAQSKAALTDWLRAKASFVIEGLKEADKDEFCRCELKLQKWYGDLRGKPFAIEAENSILDISGFSKQYNCAFIWQKDGVKKLNLYLIINYFKGGKLRFKKIKPEAFEANRFYTVINKKSGEIVPMEVNFNFDDPNLIILPLAFGKRQGREFIWNDLLSLETGSLKLANGRVIEKTLYNRRTRQDEPALFVALTFERREVLDSSNIKPMNLIGVDRGENIPAVIALTDPEGCPLSRFKDSLGNPTHILRIGESYKEKQRTIQAKKEVEQRRAGGYSRKYASKAKNLADDMVRNTARDLLYYAVTQDAMLIFENLSRGFGRQGKRTFMAERQYTRMEDWLTAKLAYEGLPSKTYLSKTLAQYTSKTCSNCGFTITSADYDRVLEKLKKTATGWMTTINGKELKVEGQITYYNRYKRQNVVKDLSVELDRLSEESVNNDISSWTKGRSGEALSLLKKRFSHRPVQEKFVCLNCGFETHADEQAALNIARSWLFLRSQEYKKYQTNKTTGNTDKRAFVETWQSFYRKKLKEVWKPAV

SEQ ID NO: 49637 - protein, 978 aa, synthetic construct
QEIKRINGIRRRLVKDSNTKKAGKTGPMKTLLVRVMTPDLRERLENLRKKPENIPQPISNTSRANLNKLLTDYTEMKKAILHVYWEEFQKDPVGLMSRVAQPASKKIDQNKLKPEMDEKGNLTTAGFACSQCGQPLFVYKLEQVSEKGKAYTNYFGRCNVAEHEKLILLAQLKPEKDSDEAVTYSLGKFGQRALDFYSIHVTKESTHPVKPLAQIAGNRYASGPVGKALSDACMGTIASFLSKYQDIIIEHQKVVKGNQKRLESLRELAGKENLEYPSVTLPPQPHTKEGVDAYNEVIARVRMWVNLNLWQKLKLSRDDAKPLLRLKGFPSFPLVERQANEVDWWDMVCNVKKLINEKKEDGKVFWQNLAGYKRQEALRPYLSSEEDRKKGKKFARYQLGDLLLHLEKKHGEDWGKVYDEAWERIDKKVEGLSKHIKLEEERRSEDAQSKAALTDWLRAKASFVIEGLKEADKDEFCRCELKLQKWYGDLRGKPFAIEAENSILDISGFSKQYNCAFIWQKDGVKKLNLYLIINYFKGGKLRFKKIKPEAFEANRFYTVINKKSGEIVPMEVNFNFDDPNLIILPLAFGKRQGREFIWNDLLSLETGSLKLANGRVIEKTLYNRRTRQDEPALFVALTFERREVLDSSNIKPMNLIGVDRGENIPAVIALTDPEGCPLSRFKDSLGNPTHILRIGESYKEKQRTIQAKKEVEQRRAGGYSRKYASKAKNLADDMVRNTARDLLYYAVTQDAMLIFENLSRGFGRQGKRTFMAERQYTRMEDWLTAKLAYEGLPSKTYLSKTLAQYTSKTCSNCGFTITSADYDRVLEKLKKTATGWMTTINGKELKVEGQITYYNRYKRQNVVKDLSVELDRLSEESVNNDISSWTKGRSGEALSLLKKRFSHRPVQEKFVCLNCGFETHADEQAALNIARSWLFLRSQEYKKYQTNKTTGNTDKRAFVETWQSFYRKKLKEVWKPAV

SEQ ID NO: 49638 - protein, 978 aa, synthetic construct
QEIKRINKIRRRLVKDSNTKKAGKTGPMKTLLVPVMTPDLRERLENLRKKPENIPQPISNTSRANLNKLLTDYTEMKKAILHVYWEEFQKDPVGLMSRVAQPASKKIDQNKLKPEMDEKGNLTTAGFACSQCGQPLFVYKLEQVSEKGKAYTNYFGRCNVAEHEKLILLAQLKPEKDSDEAVTYSLGKFGQRALDFYSIHVTKESTHPVKPLAQIAGNRYASGPVGKALSDACMGTIASFLSKYQDIIIEHQKVVKGNQKRLESLRELAGKENLEYPSVTLPPQPHTKEGVDAYNEVIARVRMWVNLNLWQKLKLSRDDAKPLLRLKGFPSFPLVERQANEVDWWDMVCNVKKLINEKKEDGKVFWQNLAGYKRQEALRPYLSSEEDRKKGKKFARYQLGDLLLHLEKKHGEDWGKVYDEAWERIDKKVEGLSKHIKLEEERRSEDAQSKAALTDWLRAKASFVIEGLKEADKDEFCRCELKLQKWYGDLRGKPFAIEAENSILDISGFSKQYNCAFIWQKDGVKKLNLYLIINYFKGGKLRFKKIKPEAFEANRFYTVINKKSGEIVPMEVNFNFDDPNLIILPLAFGKRQGREFIWNDLLSLETGSLKLANGRVIEKTLYNRRTRQDEPALFVALTFERREVLDSSNIKPMNLIGVDRGENIPAVIALTDPEGCPLSRFKDSLGNPTHILRIGESYKEKQRTIQAKKEVEQRRAGGYSRKYASKAKNLADDMVRNTARDLLYYAVTQDAMLIFENLSRGFGRQGKRTFMAERQYTRMEDWLTAKLAYEGLPSKTYLSKTLAQYTSKTCSNCGFTITSADYDRVLEKLKKTATGWMTTINGKELKVEGQITYYNRYKRQNVVKDLSVELDRLSEESVNNDISSWTKGRSGEALSLLKKRFSHRPVQEKFVCLNCGFETHADEQAALNIARSWLFLRSQEYKKYQTNKTTGNTDKRAFVETWQSFYRKKLKEVWKPAV

SEQ ID NO: 49639 - protein, 978 aa, synthetic construct
QEIKRINKIRRRLVKDSNTKKAGKTGPMKTLLVRVMTPDLRERLENLRKKPPNIPQPISNTSRANLNKLLTDYTEMKKAILHVYWEEFQKDPVGLMSRVAQPASKKIDQNKLKPEMDEKGNLTTAGFACSQCGQPLFVYKLEQVSEKGKAYTNYFGRCNVAEHEKLILLAQLKPEKDSDEAVTYSLGKFGQRALDFYSIHVTKESTHPVKPLAQIAGNRYASGPVGKALSDACMGTIASFLSKYQDIIIEHQKVVKGNQKRLESLRELAGKENLEYPSVTLPPQPHTKEGVDAYNEVIARVRMWVNLNLWQKLKLSRDDAKPLLRLKGFPSFPLVERQANEVDWWDMVCNVKKLINEKKEDGKVFWQNLAGYKRQEALRPYLSSEEDRKKGKKFARYQLGDLLLHLEKKHGEDWGKVYDEAWERIDKKVEGLSKHIKLEEERRSEDAQSKAALTDWLRAKASFVIEGLKEADKDEFCRCELKLQKWYGDLRGKPFAIEAENSILDISGFSKQYNCAFIWQKDGVKKLNLYLIINYFKGGKLRFKKIKPEAFEANRFYTVINKKSGEIVPMEVNFNFDDPNLIILPLAFGKRQGREFIWNDLLSLETGSLKLANGRVIEKTLYNRRTRQDEPALFVALTFERREVLDSSNIKPMNLIGVDRGENIPAVIALTDPEGCPLSRFKDSLGNPTHILRIGESYKEKQRTIQAKKEVEQRRAGGYSRKYASKAKNLADDMVRNTARDLLYYAVTQDAMLIFENLSRGFGRQGKRTFMAERQYTRMEDWLTAKLAYEGLPSKTYLSKTLAQYTSKTCSNCGFTITSADYDRVLEKLKKTATGWMTTINGKELKVEGQITYYNRYKRQNVVKDLSVELDRLSEESVNNDISSWTKGRSGEALSLLKKRFSHRPVQEKFVCLNCGFETHADEQAALNIARSWLFLRSQEYKKYQTNKTTGNTDKRAFVETWQSFYRKKLKEVWKPAV

SEQ ID NO: 49640 - protein, 978 aa, synthetic construct
QEIKRINKIRRRLVKDSNTKKAGKTGPMKTLLVRVMTPDLRERLENLRKKPENIPQPISNTSQANLNKLLTDYTEMKKAILHVYWEEFQKDPVGLMSRVAQPASKKIDQNKLKPEMDEKGNLTTAGFACSQCGQPLFVYKLEQVSEKGKAYTNYFGRCNVAEHEKLILLAQLKPEKDSDEAVTYSLGKFGQRALDFYSIHVTKESTHPVKPLAQIAGNRYASGPVGKALSDACMGTIASFLSKYQDIIIEHQKVVKGNQKRLESLRELAGKENLEYPSVTLPPQPHTKEGVDAYNEVIARVRMWVNLNLWQKLKLSRDDAKPLLRLKGFPSFPLVERQANEVDWWDMVCNVKKLINEKKEDGKVFWQNLAGYKRQEALRPYLSSEEDRKKGKKFARYQLGDLLLHLEKKHGEDWGKVYDEAWERIDKKVEGLSKHIKLEEERRSEDAQSKAALTDWLRAKASFVIEGLKEADKDEFCRCELKLQKWYGDLRGKPFAIEAENSILDISGFSKQYNCAFIWQKDGVKKLNLYLIINYFKGGKLRFKKIKPEAFEANRFYTVINKKSGEIVPMEVNFNFDDPNLIILPLAFGKRQGREFIWNDLLSLETGSLKLANGRVIEKTLYNRRTRQDEPALFVALTFERREVLDSSNIKPMNLIGVDRGENIPAVIALTDPEGCPLSRFKDSLGNPTHILRIGESYKEKQRTIQAKKEVEQRRAGGYSRKYASKAKNLADDMVRNTARDLLYYAVTQDAMLIFENLSRGFGRQGKRTFMAERQYTRMEDWLTAKLAYEGLPSKTYLSKTLAQYTSKTCSNCGFTITSADYDRVLEKLKKTATGWMTTINGKELKVEGQITYYNRYKRQNVVKDLSVELDRLSEESVNNDISSWTKGRSGEALSLLKKRFSHRPVQEKFVCLNCGFETHADEQAALNIARSWLFLRSQEYKKYQTNKTTGNTDKRAFVETWQSFYRKKLKEVWKPAV

SEQ ID NO: 49641 - protein, 978 aa, synthetic construct
QEIKRINKIRRRLVKDSNTKKAGKTGPMKTLLVRVMTPDLRERLENLRKKPENIPQPISNTSRANLNKLLTDYTEMKKAILHVYDEEFQKDPVGLMSRVAQPASKKIDQNKLKPEMDEKGNLTTAGFACSQCGQPLFVYKLEQVSEKGKAYTNYFGRCNVAEHEKLILLAQLKPEKDSDEAVTYSLGKFGQRALDFYSIHVTKESTHPVKPLAQIAGNRYASGPVGKALSDACMGTIASFLSKYQDIIIEHQKVVKGNQKRLESLRELAGKENLEYPSVTLPPQPHTKEGVDAYNEVIARVRMWVNLNLWQKLKLSRDDAKPLLRLKGFPSFPLVERQANEVDWWDMVCNVKKLINEKKEDGKVFWQNLAGYKRQEALRPYLSSEEDRKKGKKFARYQLGDLLLHLEKKHGEDWGKVYDEAWERIDKKVEGLSKHIKLEEERRSEDAQSKAALTDWLRAKASFVIEGLKEADKDEFCRCELKLQKWYGDLRGKPFAIEAENSILDISGFSKQYNCAFIWQKDGVKKLNLYLIINYFKGGKLRFKKIKPEAFEANRFYTVINKKSGEIVPMEVNFNFDDPNLIILPLAFGKRQGREFIWNDLLSLETGSLKLANGRVIEKTLYNRRTRQDEPALFVALTFERREVLDSSNIKPMNLIGVDRGENIPAVIALTDPEGCPLSRFKDSLGNPTHILRIGESYKEKQRTIQAKKEVEQRRAGGYSRKYASKAKNLADDMVRNTARDLLYYAVTQDAMLIFENLSRGFGRQGKRTFMAERQYTRMEDWLTAKLAYEGLPSKTYLSKTLAQYTSKTCSNCGFTITSADYDRVLEKLKKTATGWMTTINGKELKVEGQITYYNRYKRQNVVKDLSVELDRLSEESVNNDISSWTKGRSGEALSLLKKRFSHRPVQEKFVCLNCGFETHADEQAALNIARSWLFLRSQEYKKYQTNKTTGNTDKRAFVETWQSFYRKKLKEVWKPAV

SEQ ID NO: 49642 - protein, 978 aa, synthetic construct
QEIKRINKIRRRLVKDSNTKKAGKTGPMKTLLVRVMTPDLRERLENLRKKPENIPQPISNTSRANLNKLLTDYTEMKKAILHVYWEEFQKDPVGLMSRVAQPASKKIDQNKLKPEMDEKGNLTTAGFACSQCGQPLFVYKLEQVSEKGKAYTNYFGRCNVAEHEKLIKLAQLKPEKDSDEAVTYSLGKFGQRALDFYSIHVTKESTHPVKPLAQIAGNRYASGPVGKALSDACMGTIASFLSKYQDIIIEHQKVVKGNQKRLESLRELAGKENLEYPSVTLPPQPHTKEGVDAYNEVIARVRMWVNLNLWQKLKLSRDDAKPLLRLKGFPSFPLVERQANEVDWWDMVCNVKKLINEKKEDGKVFWQNLAGYKRQEALRPYLSSEEDRKKGKKFARYQLGDLLLHLEKKHGEDWGKVYDEAWERIDKKVEGLSKHIKLEEERRSEDAQSKAALTDWLRAKASFVIEGLKEADKDEFCRCELKLQKWYGDLRGKPFAIEAENSILDISGFSKQYNCAFIWQKDGVKKLNLYLIINYFKGGKLRFKKIKPEAFEANRFYTVINKKSGEIVPMEVNFNFDDPNLIILPLAFGKRQGREFIWNDLLSLETGSLKLANGRVIEKTLYNRRTRQDEPALFVALTFERREVLDSSNIKPMNLIGVDRGENIPAVIALTDPEGCPLSRFKDSLGNPTHILRIGESYKEKQRTIQAKKEVEQRRAGGYSRKYASKAKNLADDMVRNTARDLLYYAVTQDAMLIFENLSRGFGRQGKRTFMAERQYTRMEDWLTAKLAYEGLPSKTYLSKTLAQYTSKTCSNCGFTITSADYDRVLEKLKKTATGWMTTINGKELKVEGQITYYNRYKRQNVVKDLSVELDRLSEESVNNDISSWTKGRSGEALSLLKKRFSHRPVQEKFVCLNCGFETHADEQAALNIARSWLFLRSQEYKKYQTNKTTGNTDKRAFVETWQSFYRKKLKEVWKPAV

SEQ ID NO: 49643 - protein, 978 aa, synthetic construct
QEIKRINKIRRRLVKDSNTKKAGKTGPMKTLLVRVMTPDLRERLENLRKKPENIPQPISNTSRANLNKLLTDYTEMKKAILHVYWEEFQKDPVGLMSRVAQPASKKIDQNKLKPEMDEKGNLTTAGFACSQCGQPLFVYKLEQVSEKGKAYTNYFGRCNVAEHEKLILLYQLKPEKDSDEAVTYSLGKFGQRALDFYSIHVTKESTHPVKPLAQIAGNRYASGPVGKALSDACMGTIASFLSKYQDIIIEHQKVVKGNQKRLESLRELAGKENLEYPSVTLPPQPHTKEGVDAYNEVIARVRMWVNLNLWQKLKLSRDDAKPLLRLKGFPSFPLVERQANEVDWWDMVCNVKKLINEKKEDGKVFWQNLAGYKRQEALRPYLSSEEDRKKGKKFARYQLGDLLLHLEKKHGEDWGKVYDEAWERIDKKVEGLSKHIKLEEERRSEDAQSKAALTDWLRAKASFVIEGLKEADKDEFCRCELKLQKWYGDLRGKPFAIEAENSILDISGFSKQYNCAFIWQKDGVKKLNLYLIINYFKGGKLRFKKIKPEAFEANRFYTVINKKSGEIVPMEVNFNFDDPNLIILPLAFGKRQGREFIWNDLLSLETGSLKLANGRVIEKTLYNRRTRQDEPALFVALTFERREVLDSSNIKPMNLIGVDRGENIPAVIALTDPEGCPLSRFKDSLGNPTHILRIGESYKEKQRTIQAKKEVEQRRAGGYSRKYASKAKNLADDMVRNTARDLLYYAVTQDAMLIFENLSRGFGRQGKRTFMAERQYTRMEDWLTAKLAYEGLPSKTYLSKTLAQYTSKTCSNCGFTITSADYDRVLEKLKKTATGWMTTINGKELKVEGQITYYNRYKRQNVVKDLSVELDRLSEESVNNDISSWTKGRSGEALSLLKKRFSHRPVQEKFVCLNCGFETHADEQAALNIARSWLFLRSQEYKKYQTNKTTGNTDKRAFVETWQSFYRKKLKEVWKPAV

SEQ ID NO: 49644 - protein, 978 aa, synthetic construct
QEIKRINKIRRRLVKDSNTKKAGKTGPMKTLLVRVMTPDLRERLENLRKKPENIPQPISNTSRANLNKLLTDYTEMKKAILHVYWEEFQKDPVGLMSRVAQPASKKIDQNKLKPEMDEKGNLTTAGFACSQCGQPLFVYKLEQVSEKGKAYTNYFGRCNVAEHEKLILLSQLKPEKDSDEAVTYSLGKFGQRALDFYSIHVTKESTHPVKPLAQIAGNRYASGPVGKALSDACMGTIASFLSKYQDIIIEHQKVVKGNQKRLESLRELAGKENLEYPSVTLPPQPHTKEGVDAYNEVIARVRMWVNLNLWQKLKLSRDDAKPLLRLKGFPSFPLVERQANEVDWWDMVCNVKKLINEKKEDGKVFWQNLAGYKRQEALRPYLSSEEDRKKGKKFARYQLGDLLLHLEKKHGEDWGKVYDEAWERIDKKVEGLSKHIKLEEERRSEDAQSKAALTDWLRAKASFVIEGLKEADKDEFCRCELKLQKWYGDLRGKPFAIEAENSILDISGFSKQYNCAFIWQKDGVKKLNLYLIINYFKGGKLRFKKIKPEAFEANRFYTVINKKSGEIVPMEVNFNFDDPNLIILPLAFGKRQGREFIWNDLLSLETGSLKLANGRVIEKTLYNRRTRQDEPALFVALTFERREVLDSSNIKPMNLIGVDRGENIPAVIALTDPEGCPLSRFKDSLGNPTHILRIGESYKEKQRTIQAKKEVEQRRAGGYSRKYASKAKNLADDMVRNTARDLLYYAVTQDAMLIFENLSRGFGRQGKRTFMAERQYTRMEDWLTAKLAYEGLPSKTYLSKTLAQYTSKTCSNCGFTITSADYDRVLEKLKKTATGWMTTINGKELKVEGQITYYNRYKRQNVVKDLSVELDRLSEESVNNDISSWTKGRSGEALSLLKKRFSHRPVQEKFVCLNCGFETHADEQAALNIARSWLFLRSQEYKKYQTNKTTGNTDKRAFVETWQSFYRKKLKEVWKPAV

SEQ ID NO: 49645 - protein, 977 aa, synthetic construct; identical to SEQ ID NO: 258

SEQ ID NO: 49646 - protein, 978 aa, synthetic construct
QEIKRINKIRRRLVKDSNTKKAGKTGPMKTLLVRVMTPDLRERLENLRKKPENIPQPISNTSRANLNKLLTDYTEMKKAILHVYWEEFQKDPVGLMSRVAQPASKKIDQNKLKPEMDEKGNLTTAGFACSQCGQPLFVYKLEQVSEKGKAYTNYFGRCNVAEHEKLILLAQLKPEKDSDEAVTYSLGKFGQRALDFYSIHVTKESTHPVKPLAQIAGNRYASGPVGKALSDACMGTIASFLSKYQDIIIEHQKVVKGNQKRLESLRELAGKENLEYPSVTLPPQPHTSEGVDAYNEVIARVRMWVNLNLWQKLKLSRDDAKPLLRLKGFPSFPLVERQANEVDWWDMVCNVKKLINEKKEDGKVFWQNLAGYKRQEALRPYLSSEEDRKKGKKFARYQLGDLLLHLEKKHGEDWGKVYDEAWERIDKKVEGLSKHIKLEEERRSEDAQSKAALTDWLRAKASFVIEGLKEADKDEFCRCELKLQKWYGDLRGKPFAIEAENSILDISGFSKQYNCAFIWQKDGVKKLNLYLIINYFKGGKLRFKKIKPEAFEANRFYTVINKKSGEIVPMEVNFNFDDPNLIILPLAFGKRQGREFIWNDLLSLETGSLKLANGRVIEKTLYNRRTRQDEPALFVALTFERREVLDSSNIKPMNLIGVDRGENIPAVIALTDPEGCPLSRFKDSLGNPTHILRIGESYKEKQRTIQAKKEVEQRRAGGYSRKYASKAKNLADDMVRNTARDLLYYAVTQDAMLIFENLSRGFGRQGKRTFMAERQYTRMEDWLTAKLAYEGLPSKTYLSKTLAQYTSKTCSNCGFTITSADYDRVLEKLKKTATGWMTTINGKELKVEGQITYYNRYKRQNVVKDLSVELDRLSEESVNNDISSWTKGRSGEALSLLKKRFSHRPVQEKFVCLNCGFETHADEQAALNIARSWLFLRSQEYKKYQTNKTTGNTDKRAFVETWQSFYRKKLKEVWKPAV

SEQ ID NO: 49647 - protein, 978 aa, synthetic construct; identical to SEQ ID NO: 492

SEQ ID NO: 49648 - protein, 978 aa, synthetic construct
QEIKRINKIRRRLVKDSNTKKAGKTGPMKTLLVRVMTPDLRERLENLRKKPENIPQPISNTSRANLNKLLTDYTEMKKAILHVYWEEFQKDPVGLMSRVAQPASKKIDQNKLKPEMDEKGNLTTAGFACSQCGQPLFVYKLEQVSEKGKAYTNYFGRCNVAEHEKLILLAQLKPEKDSDEAVTYSLGKFGQRALDFYSIHVTKESTHPVKPLAQIAGNRYASGPVGKALSDACMGTIASFLSKYQDIIIEHQKVVKGNQKRLESLRELAGKENLEYPSVTLPPQPHTKEGVDAYNEVIARVRTWVNLNLWQKLKLSRDDAKPLLRLKGFPSFPLVERQANEVDWWDMVCNVKKLINEKKEDGKVFWQNLAGYKRQEALRPYLSSEEDRKKGKKFARYQLGDLLLHLEKKHGEDWGKVYDEAWERIDKKVEGLSKHIKLEEERRSEDAQSKAALTDWLRAKASFVIEGLKEADKDEFCRCELKLQKWYGDLRGKPFAIEAENSILDISGFSKQYNCAFIWQKDGVKKLNLYLIINYFKGGKLRFKKIKPEAFEANRFYTVINKKSGEIVPMEVNFNFDDPNLIILPLAFGKRQGREFIWNDLLSLETGSLKLANGRVIEKTLYNRRTRQDEPALFVALTFERREVLDSSNIKPMNLIGVDRGENIPAVIALTDPEGCPLSRFKDSLGNPTHILRIGESYKEKQRTIQAKKEVEQRRAGGYSRKYASKAKNLADDMVRNTARDLLYYAVTQDAMLIFENLSRGFGRQGKRTFMAERQYTRMEDWLTAKLAYEGLPSKTYLSKTLAQYTSKTCSNCGFTITSADYDRVLEKLKKTATGWMTTINGKELKVEGQITYYNRYKRQNVVKDLSVELDRLSEESVNNDISSWTKGRSGEALSLLKKRFSHRPVQEKFVCLNCGFETHADEQAALNIARSWLFLRSQEYKKYQTNKTTGNTDKRAFVETWQSFYRKKLKEVWKPAV

SEQ ID NO: 49649 - protein, 979 aa, synthetic construct
QEIKRINKIRRRLVKDSNTKKAGKTGPMKTLLVRVMTPDLRERLENLRKKPENIPQPISNTSRANLNKLLTDYTEMKKAILHVYWEEFQKDPVGLMSRVAQPASKKIDQNKLKPEMDEKGNLTTAGFACSQCGQPLFVYKLEQVSEKGKAYTNYFGRCNVAEHEKLILLAQLKPEKDSDEAVTYSLGKFGQRALDFYSIHVTKESTHPVKPLAQIAGNRYASGPVGKALSDACMGTIASFLSKYQDIIIEHQKVVKGNQKRLESLRELAGKENLEYPSVTLPPQPHTKEGVDAYNEVIARVRMWVNLNLWQKLKLSRDDAKPLLRLKGFPSFPLVERQQANEVDWWDMVCNVKKLINEKKEDGKVFWQNLAGYKRQEALRPYLSSEEDRKKGKKFARYQLGDLLLHLEKKHGEDWGKVYDEAWERIDKKVEGLSKHIKLEEERRSEDAQSKAALTDWLRAKASFVIEGLKEADKDEFCRCELKLQKWYGDLRGKPFAIEAENSILDISGFSKQYNCAFIWQKDGVKKLNLYLIINYFKGGKLRFKKIKPEAFEANRFYTVINKKSGEIVPMEVNFNFDDPNLIILPLAFGKRQGREFIWNDLLSLETGSLKLANGRVIEKTLYNRRTRQDEPALFVALTFERREVLDSSNIKPMNLIGVDRGENIPAVIALTDPEGCPLSRFKDSLGNPTHILRIGESYKEKQRTIQAKKEVEQRRAGGYSRKYASKAKNLADDMVRNTARDLLYYAVTQDAMLIFENLSRGFGRQGKRTFMAERQYTRMEDWLTAKLAYEGLPSKTYLSKTLAQYTSKTCSNCGFTITSADYDRVLEKLKKTATGWMTTINGKELKVEGQITYYNRYKRQNVVKDLSVELDRLSEESVNNDISSWTKGRSGEALSLLKKRFSHRPVQEKFVCLNCGFETHADEQAALNIARSWLFLRSQEYKKYQTNKTTGNTDKRAFVETWQSFYRKKLKEVWKPAV

SEQ ID NO: 49650 - protein, 979 aa, synthetic construct
QEIKRINKIRRRLVKDSNTKKAGKTGPMKTLLVRVMTPDLRERLENLRKKPENIPQPISNTSRANLNKLLTDYTEMKKAILHVYWEEFQKDPVGLMSRVAQPASKKIDQNKLKPEMDEKGNLTTAGFACSQCGQPLFVYKLEQVSEKGKAYTNYFGRCNVAEHEKLILLAQLKPEKDSDEAVTYSLGKFGQRALDFYSIHVTKESTHPVKPLAQIAGNRYASGPVGKALSDACMGTIASFLSKYQDIIIEHQKVVKGNQKRLESLRELAGKENLEYPSVTLPPQPHTKEGVDAYNEVIARVRMWVNLNLWQKLKLSRDDAKPLLRLKGFPSFPLVERQANAEVDWWDMVCNVKKLINEKKEDGKVFWQNLAGYKRQEALRPYLSSEEDRKKGKKFARYQLGDLLLHLEKKHGEDWGKVYDEAWERIDKKVEGLSKHIKLEEERRSEDAQSKAALTDWLRAKASFVIEGLKEADKDEFCRCELKLQKWYGDLRGKPFAIEAENSILDISGFSKQYNCAFIWQKDGVKKLNLYLIINYFKGGKLRFKKIKPEAFEANRFYTVINKKSGEIVPMEVNFNFDDPNLIILPLAFGKRQGREFIWNDLLSLETGSLKLANGRVIEKTLYNRRTRQDEPALFVALTFERREVLDSSNIKPMNLIGVDRGENIPAVIALTDPEGCPLSRFKDSLGNPTHILRIGESYKEKQRTIQAKKEVEQRRAGGYSRKYASKAKNLADDMVRNTARDLLYYAVTQDAMLIFENLSRGFGRQGKRTFMAERQYTRMEDWLTAKLAYEGLPSKTYLSKTLAQYTSKTCSNCGFTITSADYDRVLEKLKKTATGWMTTINGKELKVEGQITYYNRYKRQNVVKDLSVELDRLSEESVNNDISSWTKGRSGEALSLLKKRFSHRPVQEKFVCLNCGFETHADEQAALNIARSWLFLRSQEYKKYQTNKTTGNTDKRAFVETWQSFYRKKLKEVWKPAV

SEQ ID NO: 49651 - protein, 978 aa, synthetic construct
QEIKRINKIRRRLVKDSNTKKAGKTGPMKTLLVRVMTPDLRERLENLRKKPENIPQPISNTSRANLNKLLTDYTEMKKAILHVYWEEFQKDPVGLMSRVAQPASKKIDQNKLKPEMDEKGNLTTAGFACSQCGQPLFVYKLEQVSEKGKAYTNYFGRCNVAEHEKLILLAQLKPEKDSDEAVTYSLGKFGQRALDFYSIHVTKESTHPVKPLAQIAGNRYASGPVGKALSDACMGTIASFLSKYQDIIIEHQKVVKGNQKRLESLRELAGKENLEYPSVTLPPQPHTKEGVDAYNEVIARVRMWVNLNLWQKLKLSRDDAKPLLRLKGFPSFPLVERQANEVDWWDMVCNVKKLINEKKEDGKVFWQNLAGYKRQEALRPYLSSEEDRKKGKKFARTQLGDLLLHLEKKHGEDWGKVYDEAWERIDKKVEGLSKHIKLEEERRSEDAQSKAALTDWLRAKASFVIEGLKEADKDEFCRCELKLQKWYGDLRGKPFAIEAENSILDISGFSKQYNCAFIWQKDGVKKLNLYLIINYFKGGKLRFKKIKPEAFEANRFYTVINKKSGEIVPMEVNFNFDDPNLIILPLAFGKRQGREFIWNDLLSLETGSLKLANGRVIEKTLYNRRTRQDEPALFVALTFERREVLDSSNIKPMNLIGVDRGENIPAVIALTDPEGCPLSRFKDSLGNPTHILRIGESYKEKQRTIQAKKEVEQRRAGGYSRKYASKAKNLADDMVRNTARDLLYYAVTQDAMLIFENLSRGFGRQGKRTFMAERQYTRMEDWLTAKLAYEGLPSKTYLSKTLAQYTSKTCSNCGFTITSADYDRVLEKLKKTATGWMTTINGKELKVEGQITYYNRYKRQNVVKDLSVELDRLSEESVNNDISSWTKGRSGEALSLLKKRFSHRPVQEKFVCLNCGFETHADEQAALNIARSWLFLRSQEYKKYQTNKTTGNTDKRAFVETWQSFYRKKLKEVWKPAV

SEQ ID NO: 49652 - protein, 979 aa, synthetic construct
QEIKRINKIRRRLVKDSNTKKAGKTGPMKTLLVRVMTPDLRERLENLRKKPENIPQPISNTSRANLNKLLTDYTEMKKAILHVYWEEFQKDPVGLMSRVAQPASKKIDQNKLKPEMDEKGNLTTAGFACSQCGQPLFVYKLEQVSEKGKAYTNYFGRCNVAEHEKLILLAQLKPEKDSDEAVTYSLGKFGQRALDFYSIHVTKESTHPVKPLAQIAGNRYASGPVGKALSDACMGTIASFLSKYQDIIIEHQKVVKGNQKRLESLRELAGKENLEYPSVTLPPQPHTKEGVDAYNEVIARVRMWVNLNLWQKLKLSRDDAKPLLRLKGFPSFPLVERQANEVDWWDMVCNVKKLINEKKEDGKVFWQNLAGYKRQEALRPYLSSEEDRKKGKKFARYQLGDLLLHLEKKHEGEDWGKVYDEAWERIDKKVEGLSKHIKLEEERRSEDAQSKAALTDWLRAKASFVIEGLKEADKDEFCRCELKLQKWYGDLRGKPFAIEAENSILDISGFSKQYNCAFIWQKDGVKKLNLYLIINYFKGGKLRFKKIKPEAFEANRFYTVINKKSGEIVPMEVNFNFDDPNLIILPLAFGKRQGREFIWNDLLSLETGSLKLANGRVIEKTLYNRRTRQDEPALFVALTFERREVLDSSNIKPMNLIGVDRGENIPAVIALTDPEGCPLSRFKDSLGNPTHILRIGESYKEKQRTIQAKKEVEQRRAGGYSRKYASKAKNLADDMVRNTARDLLYYAVTQDAMLIFENLSRGFGRQGKRTFMAERQYTRMEDWLTAKLAYEGLPSKTYLSKTLAQYTSKTCSNCGFTITSADYDRVLEKLKKTATGWMTTINGKELKVEGQITYYNRYKRQNVVKDLSVELDRLSEESVNNDISSWTKGRSGEALSLLKKRFSHRPVQEKFVCLNCGFETHADEQAALNIARSWLFLRSQEYKKYQTNKTTGNTDKRAFVETWQSFYRKKLKEVWKPAV

SEQ ID NO: 49653 - protein, 978 aa, synthetic construct
QEIKRINKIRRRLVKDSNTKKAGKTGPMKTLLVRVMTPDLRERLENLRKKPENIPQPISNTSRANLNKLLTDYTEMKKAILHVYWEEFQKDPVGLMSRVAQPASKKIDQNKLKPEMDEKGNLTTAGFACSQCGQPLFVYKLEQVSEKGKAYTNYFGRCNVAEHEKLILLAQLKPEKDSDEAVTYSLGKFGQRALDFYSIHVTKESTHPVKPLAQIAGNRYASGPVGKALSDACMGTIASFLSKYQDIIIEHQKVVKGNQKRLESLRELAGKENLEYPSVTLPPQPHTKEGVDAYNEVIARVRMWVNLNLWQKLKLSRDDAKPLLRLKGFPSFPLVERQANEVDWWDMVCNVKKLINEKKEDGKVFWQNLAGYKRQEALRPYLSSEEDRKKGKKFARYQLGDLLLHLEKKHGEDWGKVYDEAWERIDKKVEGLSKHIKLEEERRSEDAQSKAALTDWLRAKASFVIEGLKEADKDEFCRCDLKLQKWYGDLRGKPFAIEAENSILDISGFSKQYNCAFIWQKDGVKKLNLYLIINYFKGGKLRFKKIKPEAFEANRFYTVINKKSGEIVPMEVNFNFDDPNLIILPLAFGKRQGREFIWNDLLSLETGSLKLANGRVIEKTLYNRRTRQDEPALFVALTFERREVLDSSNIKPMNLIGVDRGENIPAVIALTDPEGCPLSRFKDSLGNPTHILRIGESYKEKQRTIQAKKEVEQRRAGGYSRKYASKAKNLADDMVRNTARDLLYYAVTQDAMLIFENLSRGFGRQGKRTFMAERQYTRMEDWLTAKLAYEGLPSKTYLSKTLAQYTSKTCSNCGFTITSADYDRVLEKLKKTATGWMTTINGKELKVEGQITYYNRYKRQNVVKDLSVELDRLSEESVNNDISSWTKGRSGEALSLLKKRFSHRPVQEKFVCLNCGFETHADEQAALNIARSWLFLRSQEYKKYQTNKTTGNTDKRAFVETWQSFYRKKLKEVWKPAV

SEQ ID NO: 49654 - protein, 978 aa, synthetic construct
QEIKRINKIRRRLVKDSNTKKAGKTGPMKTLLVRVMTPDLRERLENLRKKPENIPQPISNTSRANLNKLLTDYTEMKKAILHVYWEEFQKDPVGLMSRVAQPASKKIDQNKLKPEMDEKGNLTTAGFACSQCGQPLFVYKLEQVSEKGKAYTNYFGRCNVAEHEKLILLAQLKPEKDSDEAVTYSLGKFGQRALDFYSIHVTKESTHPVKPLAQIAGNRYASGPVGKALSDACMGTIASFLSKYQDIIIEHQKVVKGNQKRLESLRELAGKENLEYPSVTLPPQPHTKEGVDAYNEVIARVRMWVNLNLWQKLKLSRDDAKPLLRLKGFPSFPLVERQANEVDWWDMVCNVKKLINEKKEDGKVFWQNLAGYKRQEALRPYLSSEEDRKKGKKFARYQLGDLLLHLEKKHGEDWGKVYDEAWERIDKKVEGLSKHIKLEEERRSEDAQSKAALTDWLRAKASFVIEGLKEADKDEFCRCELKLQKWYGDLRGKPFAIEAENSILDISGFSKQYNCAFIWQKDGVKKLNLYLIINYFKGGKLRFKKIKPEAFEANRFYTVINKKSGEIVPMEVNFNFDDPNLIILPLAFGKRFGREFIWNDLLSLETGSLKLANGRVIEKTLYNRRTRQDEPALFVALTFERREVLDSSNIKPMNLIGVDRGENIPAVIALTDPEGCPLSRFKDSLGNPTHILRIGESYKEKQRTIQAKKEVEQRRAGGYSRKYASKAKNLADDMVRNTARDLLYYAVTQDAMLIFENLSRGFGRQGKRTFMAERQYTRMEDWLTAKLAYEGLPSKTYLSKTLAQYTSKTCSNCGFTITSADYDRVLEKLKKTATGWMTTINGKELKVEGQITYYNRYKRQNVVKDLSVELDRLSEESVNNDISSWTKGRSGEALSLLKKRFSHRPVQEKFVCLNCGFETHADEQAALNIARSWLFLRSQEYKKYQTNKTTGNTDKRAFVETWQSFYRKKLKEVWKPAV

SEQ ID NO: 49655 - protein, 978 aa, synthetic construct
QEIKRINKIRRRLVKDSNTKKAGKTGPMKTLLVRVMTPDLRERLENLRKKPENIPQPISNTSRANLNKLLTDYTEMKKAILHVYWEEFQKDPVGLMSRVAQPASKKIDQNKLKPEMDEKGNLTTAGFACSQCGQPLFVYKLEQVSEKGKAYTNYFGRCNVAEHEKLILLAQLKPEKDSDEAVTYSLGKFGQRALDFYSIHVTKESTHPVKPLAQIAGNRYASGPVGKALSDACMGTIASFLSKYQDIIIEHQKVVKGNQKRLESLRELAGKENLEYPSVTLPPQPHTKEGVDAYNEVIARVRMWVNLNLWQKLKLSRDDAKPLLRLKGFPSFPLVERQANEVDWWDMVCNVKKLINEKKEDGKVFWQNLAGYKRQEALRPYLSSEEDRKKGKKFARYQLGDLLLHLEKKHGEDWGKVYDEAWERIDKKVEGLSKHIKLEEERRSEDAQSKAALTDWLRAKASFVIEGLKEADKDEFCRCELKLQKWYGDLRGKPFAIEAENSILDISGFSKQYNCAFIWQKDGVKKLNLYLIINYFKGGKLRFKKIKPEAFEANRFYTVINKKSGEIVPMEVNFNFDDPNLIILPLAFGKRVGREFIWNDLLSLETGSLKLANGRVIEKTLYNRRTRQDEPALFVALTFERREVLDSSNIKPMNLIGVDRGENIPAVIALTDPEGCPLSRFKDSLGNPTHILRIGESYKEKQRTIQAKKEVEQRRAGGYSRKYASKAKNLADDMVRNTARDLLYYAVTQDAMLIFENLSRGFGRQGKRTFMAERQYTRMEDWLTAKLAYEGLPSKTYLSKTLAQYTSKTCSNCGFTITSADYDRVLEKLKKTATGWMTTINGKELKVEGQITYYNRYKRQNVVKDLSVELDRLSEESVNNDISSWTKGRSGEALSLLKKRFSHRPVQEKFVCLNCGFETHADEQAALNIARSWLFLRSQEYKKYQTNKTTGNTDKRAFVETWQSFYRKKLKEVWKPAV

SEQ ID NO: 49656 - protein, 979 aa, synthetic construct
QEIKRINKIRRRLVKDSNTKKAGKTGPMKTLLVRVMTPDLRERLENLRKKPENIPQPISNTSRANLNKLLTDYTEMKKAILHVYWEEFQKDPVGLMSRVAQPASKKIDQNKLKPEMDEKGNLTTAGFACSQCGQPLFVYKLEQVSEKGKAYTNYFGRCNVAEHEKLILLAQLKPEKDSDEAVTYSLGKFGQRALDFYSIHVTKESTHPVKPLAQIAGNRYASGPVGKALSDACMGTIASFLSKYQDIIIEHQKVVKGNQKRLESLRELAGKENLEYPSVTLPPQPHTKEGVDAYNEVIARVRMWVNLNLWQKLKLSRDDAKPLLRLKGFPSFPLVERQANEVDWWDMVCNVKKLINEKKEDGKVFWQNLAGYKRQEALRPYLSSEEDRKKGKKFARYQLGDLLLHLEKKHGEDWGKVYDEAWERIDKKVEGLSKHIKLEEERRSEDAQSKAALTDWLRAKASFVIEGLKEADKDEFCRCELKLQKWYGDLRGKPFAIEAENSILDISGFSKQYNCAFIWQKDGVKKLNLYLIINYFKGGKLRFKKIKPEAFEANRFYTVINKKSGEIVPMEVNFNFDDPNLIILPLAFGKRQGREFIWNDLLSLETGSLKLANGRVIEKTLYNRRTRQDEPALFVALTFERREVLDSSNIKTPMNLIGVDRGENIPAVIALTDPEGCPLSRFKDSLGNPTHILRIGESYKEKQRTIQAKKEVEQRRAGGYSRKYASKAKNLADDMVRNTARDLLYYAVTQDAMLIFENLSRGFGRQGKRTFMAERQYTRMEDWLTAKLAYEGLPSKTYLSKTLAQYTSKTCSNCGFTITSADYDRVLEKLKKTATGWMTTINGKELKVEGQITYYNRYKRQNVVKDLSVELDRLSEESVNNDISSWTKGRSGEALSLLKKRFSHRPVQEKFVCLNCGFETHADEQAALNIARSWLFLRSQEYKKYQTNKTTGNTDKRAFVETWQSFYRKKLKEVWKPAV

SEQ ID NO: 49657 - protein, 979 aa, synthetic construct
QEIKRINKIRRRLVKDSNTKKAGKTGPMKTLLVRVMTPDLRERLENLRKKPENIPQPISNTSRANLNKLLTDYTEMKKAILHVYWEEFQKDPVGLMSRVAQPASKKIDQNKLKPEMDEKGNLTTAGFACSQCGQPLFVYKLEQVSEKGKAYTNYFGRCNVAEHEKLILLAQLKPEKDSDEAVTYSLGKFGQRALDFYSIHVTKESTHPVKPLAQIAGNRYASGPVGKALSDACMGTIASFLSKYQDIIIEHQKVVKGNQKRLESLRELAGKENLEYPSVTLPPQPHTKEGVDAYNEVIARVRMWVNLNLWQKLKLSRDDAKPLLRLKGFPSFPLVERQANEVDWWDMVCNVKKLINEKKEDGKVFWQNLAGYKRQEALRPYLSSEEDRKKGKKFARYQLGDLLLHLEKKHGEDWGKVYDEAWERIDKKVEGLSKHIKLEEERRSEDAQSKAALTDWLRAKASFVIEGLKEADKDEFCRCELKLQKWYGDLRGKPFAIEAENSILDISGFSKQYNCAFIWQKDGVKKLNLYLIINYFKGGKLRFKKIKPEAFEANRFYTVINKKSGEIVPMEVNFNFDDPNLIILPLAFGKRQGREFIWNDLLSLETGSLKLANGRVIEKTLYNRRTRQDEPALFVALTFERREVLDSSNIKPMSNLIGVDRGENIPAVIALTDPEGCPLSRFKDSLGNPTHILRIGESYKEKQRTIQAKKEVEQRRAGGYSRKYASKAKNLADDMVRNTARDLLYYAVTQDAMLIFENLSRGFGRQGKRTFMAERQYTRMEDWLTAKLAYEGLPSKTYLSKTLAQYTSKTCSNCGFTITSADYDRVLEKLKKTATGWMTTINGKELKVEGQITYYNRYKRQNVVKDLSVELDRLSEESVNNDISSWTKGRSGEALSLLKKRFSHRPVQEKFVCLNCGFETHADEQAALNIARSWLFLRSQEYKKYQTNKTTGNTDKRAFVETWQSFYRKKLKEVWKPAV

SEQ ID NO: 49658 - protein, 978 aa, synthetic construct
QEIKRINKIRRRLVKDSNTKKAGKTGPMKTLLVRVMTPDLRERLENLRKKPENIPQPISNTSRANLNKLLTDYTEMKKAILHVYWEEFQKDPVGLMSRVAQPASKKIDQNKLKPEMDEKGNLTTAGFACSQCGQPLFVYKLEQVSEKGKAYTNYFGRCNVAEHEKLILLAQLKPEKDSDEAVTYSLGKFGQRALDFYSIHVTKESTHPVKPLAQIAGNRYASGPVGKALSDACMGTIASFLSKYQDIIIEHQKVVKGNQKRLESLRELAGKENLEYPSVTLPPQPHTKEGVDAYNEVIARVRMWVNLNLWQKLKLSRDDAKPLLRLKGFPSFPLVERQANEVDWWDMVCNVKKLINEKKEDGKVFWQNLAGYKRQEALRPYLSSEEDRKKGKKFARYQLGDLLLHLEKKHGEDWGKVYDEAWERIDKKVEGLSKHIKLEEERRSEDAQSKAALTDWLRAKASFVIEGLKEADKDEFCRCELKLQKWYGDLRGKPFAIEAENSILDISGFSKQYNCAFIWQKDGVKKLNLYLIINYFKGGKLRFKKIKPEAFEANRFYTVINKKSGEIVPMEVNFNFDDPNLIILPLAFGKRQGREFIWNDLLSLETGSLKLANGRVIEKTLYNRRTRQDEPALFVALTFERREVLDSSNIKPMNLIGVDRGENIPAVIALTDPEGCPLSRFKDSLGNPTHILRIGESYKEKQRTIQAKKEVEQRRAGGYSRKYASKAKNLADDMVRNTARDLLYYAVTQDAMLIFENLSRGFGRQGKRTFSAERQYTRMEDWLTAKLAYEGLPSKTYLSKTLAQYTSKTCSNCGFTITSADYDRVLEKLKKTATGWMTTINGKELKVEGQITYYNRYKRQNVVKDLSVELDRLSEESVNNDISSWTKGRSGEALSLLKKRFSHRPVQEKFVCLNCGFETHADEQAALNIARSWLFLRSQEYKKYQTNKTTGNTDKRAFVETWQSFYRKKLKEVWKPAV

SEQ ID NO: 49659 - protein, 978 aa, synthetic construct
QEIKRINKIRRRLVKDSNTKKAGKTGPMKTLLVRVMTPDLRERLENLRKKPENIPQPISNTSRANLNKLLTDYTEMKKAILHVYWEEFQKDPVGLMSRVAQPASKKIDQNKLKPEMDEKGNLTTAGFACSQCGQPLFVYKLEQVSEKGKAYTNYFGRCNVAEHEKLILLAQLKPEKDSDEAVTYSLGKFGQRALDFYSIHVTKESTHPVKPLAQIAGNRYASGPVGKALSDACMGTIASFLSKYQDIIIEHQKVVKGNQKRLESLRELAGKENLEYPSVTLPPQPHTKEGVDAYNEVIARVRMWVNLNLWQKLKLSRDDAKPLLRLKGFPSFPLVERQANEVDWWDMVCNVKKLINEKKEDGKVFWQNLAGYKRQEALRPYLSSEEDRKKGKKFARYQLGDLLLHLEKKHGEDWGKVYDEAWERIDKKVEGLSKHIKLEEERRSEDAQSKAALTDWLRAKASFVIEGLKEADKDEFCRCELKLQKWYGDLRGKPFAIEAENSILDISGFSKQYNCAFIWQKDGVKKLNLYLIINYFKGGKLRFKKIKPEAFEANRFYTVINKKSGEIVPMEVNFNFDDPNLIILPLAFGKRQGREFIWNDLLSLETGSLKLANGRVIEKTLYNRRTRQDEPALFVALTFERREVLDSSNIKPMNLIGVDRGENIPAVIALTDPEGCPLSRFKDSLGNPTHILRIGESYKEKQRTIQAKKEVEQRRAGGYSRKYASKAKNLADDMVRNTARDLLYYAVTQDAMLIFENLSRGFGRQGKRTFMAERQYTRMEDWLTAKLAYEGLPSKTYLSKTLAQYTSKTCSNCGFTITSADYDRVLEKLKKTATGWMTTINGKELKVEGQITYYNRYKRQNVVKDLSVELDRLSEESVNNDISSWDKGRSGEALSLLKKRFSHRPVQEKFVCLNCGFETHADEQAALNIARSWLFLRSQEYKKYQTNKTTGNTDKRAFVETWQSFYRKKLKEVWKPAV

SEQ ID NO: 49660 - protein, 978 aa, synthetic construct
QEIKRINKIRRRLVKDSNTKKAGKTGPMKTLLVRVMTPDLRERLENLRKKPENIPQPISNTSRANLNKLLTDYTEMKKAILHVYWEEFQVDPVGLMSRVAQPASKKIDQNKLKPEMDEKGNLTTAGFACSQCGQPLFVYKLEQVSEKGKAYTNYFGRCNVAEHEKLILLAQLKPEKDSDEAVTYSLGKFGQRALDFYSIHVTKESTHPVKPLAQIAGNRYASGPVGKALSDACMGTIASFLSKYQDIIIEHQKVVKGNQKRLESLRELAGKENLEYPSVTLPPQPHTKEGVDAYNEVIARVRMWVNLNLWQKLKLSRDDAKPLLRLKGFPSFPLVERQANEVDWWDMVCNVKKLINEKKEDGKVFWQNLAGYKRQEALRPYLSSEEDRKKGKKFARYQLGDLLLHLEKKHGEDWGKVYDEAWERIDKKVEGLSKHIKLEEERRSEDAQSKAALTDWLRAKASFVIEGLKEADKDEFCRCELKLQKWYGDLRGKPFAIEAENSILDISGFSKQYNCAFIWQKDGVKKLNLYLIINYFKGGKLRFKKIKPEAFEANRFYTVINKKSGEIVPMEVNFNFDDPNLIILPLAFGKRQGREFIWNDLLSLETGSLKLANGRVIEKTLYNRRTRQDEPALFVALTFERREVLDSSNIKPMNLIGVDRGENIPAVIALTDPEGCPLSRFKDSLGNPTHILRIGESYKEKQRTIQAKKEVEQRRAGGYSRKYASKAKNLADDMVRNTARDLLYYAVTQDAMLIFENLSRGFGRQGKRTFMAERQYTRMEDWLTAKLAYEGLPSKTYLSKTLAQYTSKTCSNCGFTITSADYDRVLEKLKKTATGWMTTINGKELKVEGQITYYNRYKRQNVVKDLSVELDRLSEESVNNDISSWTKGRSGEALSLLKKRFSHRPVQEKFVCLNCGFETHADEQAALNIARSWLFLRSQEYKKYQTNKTTGNTDKRAFVETWQSFYRKKLKEVWKPAV

SEQ ID NO: 49661 - protein, 978 aa, synthetic construct
QEIKRLNKIRRRLVKDSNTKKAGKTGPMKTLLVRVMTPDLRERLENLRKKPENIPQPISNTSRANLNKLLTDYTEMKKAILHVYWEEFQKDPVGLMSRVAQPASKKIDQNKLKPEMDEKGNLTTAGFACSQCGQPLFVYKLEQVSEKGKAYTNYFGRCNVAEHEKLILLAQLKPEKDSDEAVTYSLGKFGQRALDFYSIHVTKESTHPVKPLAQIAGNRYASGPVGKALSDACMGTIASFLSKYQDIIIEHQKVVKGNQKRLESLRELAGKENLEYPSVTLPPQPHTKEGVDAYNEVIARVRMWVNLNLWQKLKLSRDDAKPLLRLKGFPSFPLVERQANEVDWWDMVCNVKKLINEKKEDGKVFWQNLAGYKRQEALRPYLSSEEDRKKGKKFARYQLGDLLLHLEKKHGEDWGKVYDEAWERIDKKVEGLSKHIKLEEERRSEDAQSKAALTDWLRAKASFVIEGLKEADKDEFCRCELKLQKWYGDLRGKPFAIEAENSILDISGFSKQYNCAFIWQKDGVKKLNLYLIINYFKGGKLRFKKIKPEAFEANRFYTVINKKSGEIVPMEVNFNFDDPNLIILPLAFGKRQGREFIWNDLLSLETGSLKLANGRVIEKTLYNRRTRQDEPALFVALTFERREVLDSSNIKPMNLIGVDRGENIPAVIALTDPEGCPLSRFKDSLGNPTHILRIGESYKEKQRTIQAKKEVEQRRAGGYSRKYASKAKNLADDMVRNTARDLLYYAVTQDAMLIFENLSRGFGRQGKRTFMAERQYTRMEDWLTAKLAYEGLPSKTYLSKTLAQYTSKTCSNCGFTITSADYDRVLEKLKKTATGWMTTINGKELKVEGQITYYNRYKRQNVVKDLSVELDRLSEESVNNDISSWTKGRSGEALSLLKKRFSHRPVQEKFVCLNCGFETHADEQAALNIARSWLFLRSQEYKKYQTNKTTGNTDKRAFVETWQSFYRKKLKEVWKPAV

SEQ ID NO: 49662 - protein, 978 aa, synthetic construct
QEIKRINKIRRRLVKDSNTKKAGKTGPMKTLLVRVMTPDLRERLENLRKKPENIPQPISNTSRANLNKLLTDYTEMKKAILHVYWEEFQKDPVGLMSRVAQPASKKIDQNKLKPEMDEKGNLTTAGFACSQCGQPLFVYKLEQVSEKGKAYTNYVGRCNVAEHEKLILLAQLKPEKDSDEAVTYSLGKFGQRALDFYSIHVTKESTHPVKPLAQIAGNRYASGPVGKALSDACMGTIASFLSKYQDIIIEHQKVVKGNQKRLESLRELAGKENLEYPSVTLPPQPHTKEGVDAYNEVIARVRMWVNLNLWQKLKLSRDDAKPLLRLKGFPSFPLVERQANEVDWWDMVCNVKKLINEKKEDGKVFWQNLAGYKRQEALRPYLSSEEDRKKGKKFARYQLGDLLLHLEKKHGEDWGKVYDEAWERIDKKVEGLSKHIKLEEERRSEDAQSKAALTDWLRAKASFVIEGLKEADKDEFCRCELKLQKWYGDLRGKPFAIEAENSILDISGFSKQYNCAFIWQKDGVKKLNLYLIINYFKGGKLRFKKIKPEAFEANRFYTVINKKSGEIVPMEVNFNFDDPNLIILPLAFGKRQGREFIWNDLLSLETGSLKLANGRVIEKTLYNRRTRQDEPALFVALTFERREVLDSSNIKPMNLIGVDRGENIPAVIALTDPEGCPLSRFKDSLGNPTHILRIGESYKEKQRTIQAKKEVEQRRAGGYSRKYASKAKNLADDMVRNTARDLLYYAVTQDAMLIFENLSRGFGRQGKRTFMAERQYTRMEDWLTAKLAYEGLPSKTYLSKTLAQYTSKTCSNCGFTITSADYDRVLEKLKKTATGWMTTINGKELKVEGQITYYNRYKRQNVVKDLSVELDRLSEESVNNDISSWTKGRSGEALSLLKKRFSHRPVQEKFVCLNCGFETHADEQAALNIARSWLFLRSQEYKKYQTNKTTGNTDKRAFVETWQSFYRKKLKEVWKPAV

SEQ ID NO: 49663 - protein, 978 aa, synthetic construct
QEIKRINKIRRRLVKDSNTKKAGKTGPMKTLLVRVMTPDLRERLENLRKKPENIPQPISNTSRANLNKLLTDYTEMKKAILHVYWEEFQKDPVGLMSRVAQPASKKIDQNKLKPEMDEKGNLTTAGFACSQCGQPLFVYKLEQVSEKGKAYTNYFGRCNVAEHEKLILLAQLKPEKDSDEAVTYSLGKFGQRALDFYSIHVTKESTHPVKPLAQIAGNRYASGPVGKALSDACMGTIASFLSKYQDIIIEHQKVVKGNQKRLESLRELAGKENLEYPSVTLPPQPHTKEGVDAYNEVIARVRMWVNLNLWQKLKLSRDDAKPLLRLKGFPSFPLVERQANEVDWWDMVCNVKKLINEKKEDGKVFWQNLAGYKRQEALRPYLSSEEDRKKGKKFARYQLGDLLLHLEKKHGEDWGKVYDEAWERIDKKVEGLSKHIKLEEERRSEDAQSKAALTDWLRAKASFVIEGLKEADKDEFCRCELKLQKWYGDLRGKPFAIEAENSILDISGFSKQYNCAFIWQKDGVKKLNLYLIINYFKGGKLRFKKIKPEAFEANRFYTVINKKSGEIVPMEVNFNFDDPNLIILPLAFGKRQGREFIWNDLLSLETGSLKLANGRVIEKTLYNRRTRQDEPALFVALTFERREVLDSSNIKPMNLIGVDRGENIPAVIALTDPEGCPLSRFKDSLGNPTHILRIGESYKEKQRTIQAKKEVEQRRAGGYSRKYASKAKNLADDMVRNTARDLLYYAVTQDAMLIFENLSRGFGRQGKRTFMAERQYTRMEDWLTAKLAYEGLASKTYLSKTLAQYTSKTCSNCGFTITSADYDRVLEKLKKTATGWMTTINGKELKVEGQITYYNRYKRQNVVKDLSVELDRLSEESVNNDISSWTKGRSGEALSLLKKRFSHRPVQEKFVCLNCGFETHADEQAALNIARSWLFLRSQEYKKYQTNKTTGNTDKRAFVETWQSFYRKKLKEVWKPAV

SEQ ID NO: 49664 - protein, 978 aa, synthetic construct
QEIKRINKIRRRLVKDSNTKKAGKTGPMKTLLVRVMTPDLRERLENLRKKPENIPQPISNTSRANLNKLLTDYTEMKKAILHVYWEEFQKDPVGLMSRVAQPASKKIDQNKLKPEMDEKGNLTTAGFACSQCGQPLFVYKLEQVSEKGKAYTNYFGRCNVAEHEKLILLAQLKPEKDSDEAVTYSLGKFGQRALDFYSIHVTKESTHPVKPLAQIAGNRYASGPVGKALSDACMGTIASFLSKYQDIIIEHQKVVKGNQKRLESLRELAGKENLEYPSVTLPPQPHTKEGVDAYNEVIARVRMWVNLNLWQKLKLSRDDAKPLLRLKGFPSFPLVERQANEVDWWDMVCNVKKLINEKKEDGKVFWQNLAGYKRQEALRPYLSSEEDRKKGKKFARYQLGDLLLHLEKKHGEDWGKVYDEAWERIDKKVEGLSKHIKLEEERRSEDAQSKAALTDWLRAKASFVIEGLKEADKDEFCRCELKLQKWYGDLRGKPFAIEAENSILDISGFSKQYNCAFIWQKDGVKKLNLYLIINYFKGGKLRFKKIKPEAFEANRFYTVINKKSGEIVPMEVNFNFDDPNLIILPLAFGKRQGREFIWNDLLSLETGSLKLANGRVIEKTLYNRRTRQDEPALFVALTFERREVLDSSNIKPMNLIGVDRGENIPAVIALTDPEGCPLSRFKDSLGNPTHILRIGESYKEKQRTIQAKKEVEQRRAGGYSRKYASKAKNLADDMVRNTARDLLYYAVTQDAMLIFENLSRGFGRQGKRTFMAERQYTRMEDWLTAKLAYEGLPSKVYLSKTLAQYTSKTCSNCGFTITSADYDRVLEKLKKTATGWMTTINGKELKVEGQITYYNRYKRQNVVKDLSVELDRLSEESVNNDISSWTKGRSGEALSLLKKRFSHRPVQEKFVCLNCGFETHADEQAALNIARSWLFLRSQEYKKYQTNKTTGNTDKRAFVETWQSFYRKKLKEVWKPAV

SEQ ID NO: 49665 - protein, 979 aa, synthetic construct
QEIKRINKIRRRLVKDSNTKKAGKTGPMKTLLVRVMTPDLRERLENLRKKPENIPQPISNTSRANLNKLLTDYTEMKKAILHVYWEEFQKDPVGLMSRVAQPASKKIDQNKLKPEMDEKGNLTTAGFACSQCGQPLFVYKLEQVSEKGKAYTNYFGRCNVAEHEKLILLAQLKPEKDSDEAVTYSLGKFGQRALDFYSIHVTKESTHPVKPLAQIAGNRYASGPVGKALSDACMGTIASFLSKYQDIIIEHQKVVKGNQKRLESLRELAGKENLEYPSVTLPPQPHTKEGVDAYNEVIARVRMWVNLNLWQKLKLSRDDAKPLLRLKGFPSFPLVERQANEVDWWDMVCNVKKLINEKKEDGKVFWQNLAGYKRQEALRPYLSSEEDRKKGKKFARYQLGDLLLHLEKKHGEDWGKVYDEAWERIDKKVEGLSKHIKLEEERRSEDAQSKAALTDWLRAKASFVIEGLKEADKDEFCRCELKLQKWYGDLRGKPFAIEAENSILDISGFSKQYNCAFIWQKDGVKKLNLYLIINYFKGGKLRFKKIKPEAFEANRFYTVINKKSGEIVPMEVNFNFDDPNLIILPLAFGKRQGREFIWNDLLSLETGSLKLANGRVIEKTLYNRRTRQDEPALFVALTFERREVLDSSNIKPMNLIGVDRGENIPAVIALTDPEGCPLSRFKDSLGNPTHILRIGESYKEKQRTIQAKKEVEQRRAGGYSRKYASKAKNLADDMVRNTARDLLYYAVTQDAMLIFENLSRGFGRQGKRTFMAERQYTRMEDWLTAKLAYEGPLPSKTYLSKTLAQYTSKTCSNCGFTITSADYDRVLEKLKKTATGWMTTINGKELKVEGQITYYNRYKRQNVVKDLSVELDRLSEESVNNDISSWTKGRSGEALSLLKKRFSHRPVQEKFVCLNCGFETHADEQAALNIARSWLFLRSQEYKKYQTNKTTGNTDKRAFVETWQSFYRKKLKEVWKPAV

SEQ ID NO: 49666 - protein, 979 aa, synthetic construct
QEIKRINKIRRRLVKDSNTKKAGKTGPMKTLLVRVMTPDLRERLENLRKKPENIPQPISNTSRANLNKLLTDYTEMKKAILHVYWEEFQKDPVGLMSRVAQPASKKIDQNKLKPEMDEKGNLTTAGFACSQCGQPLFVYKLEQVSEKGKAYTNYFGRCNVAEHEKLILLAQLKPEKDSDEAVTYSLGKFGQRALDFYSIHVTKESTHPVKPLAQIAGNRYASGPVGKALSDACMGTIASFLSKYQDIIIEHQKVVKGNQKRLESLRELAGKENLEYPSVTLPPQPHTKEGVDAYNEVIARVRMWVNLNLWQKLKLSRDDAKPLLRLKGFPSFPLVERQANEVDWWDMVCNVKKLINEKKEDGKVFWQNLAGYKRQEALRPYLSSEEDVRKKGKKFARYQLGDLLLHLEKKHGEDWGKVYDEAWERIDKKVEGLSKHIKLEEERRSEDAQSKAALTDWLRAKASFVIEGLKEADKDEFCRCELKLQKWYGDLRGKPFAIEAENSILDISGFSKQYNCAFIWQKDGVKKLNLYLIINYFKGGKLRFKKIKPEAFEANRFYTVINKKSGEIVPMEVNFNFDDPNLIILPLAFGKRQGREFIWNDLLSLETGSLKLANGRVIEKTLYNRRTRQDEPALFVALTFERREVLDSSNIKPMNLIGVDRGENIPAVIALTDPEGCPLSRFKDSLGNPTHILRIGESYKEKQRTIQAKKEVEQRRAGGYSRKYASKAKNLADDMVRNTARDLLYYAVTQDAMLIFENLSRGFGRQGKRTFMAERQYTRMEDWLTAKLAYEGLPSKTYLSKTLAQYTSKTCSNCGFTITSADYDRVLEKLKKTATGWMTTINGKELKVEGQITYYNRYKRQNVVKDLSVELDRLSEESVNNDISSWTKGRSGEALSLLKKRFSHRPVQEKFVCLNCGFETHADEQAALNIARSWLFLRSQEYKKYQTNKTTGNTDKRAFVETWQSFYRKKLKEVWKPAV

SEQ ID NO: 49667 - protein, 978 aa, synthetic construct
QEIKRINKIRRRLVKDSNTKKAGKTGPMKTLLVRVMTPDLRERLENLRKKPENIPQPISNTSRANLNKLLTDYTEMKKAILHVYWEEFQKDPVGLMSRVAQPASKKIDQNKLKPEMDEKGNLTTAGFACSQCGQPLFVYKLEQVSEKGKAYTNYFGRCNVAEHEKLILLAQLKPEKDSDEAVTYSLGKFGQRALDFYSIHVTKESTHPVKPLAQIAGNRYASGPVGKALSDACMGTIASFLSKYQDIIIEHQKVVKGNQKRLESLRELAGKENLEYPSVTLPPQPHTKEGVDAYNEVIARVRMWVNLNLWQKLKLSRDDAKPLLRLKGFPSFPLVERQANEVDWWDMVCNVKKLINEKKEDGKVFWQNLAGYKRQEALRPYLSSEEDRKKGKKFARYQLGDLLLHLEKKHGEDWGKVYDEAWERIDKKVEGLSKHIKLEEERRSEDAQSKAALTDWLRAKASFVIEGLKEADKDEFCRCELKLQKWYGDLRGKPFAIEAENSILDISGFSKQYNCAFIWQKDGVKKLNLYLIINYFKGGKLRFKKIKPEAFEANRFYTVINKKSGEIVPMEVNFNFDDPNLIILPLAFGKRQGREFIWNDLLSLETGSLKLANGRVIEKTLYNRRTRQDEPALFVALTFERREVLDSSNIKPMNLIGVDRGENIPAVIALTDPEGCPLSRFKDSLGNPTHILRIGESYKEKQRTIQAKKEVEQRRAGGYSRKYASKAKNLADDMVRNTARDLLYYAVTQDAMLIFENLSRGFGRQGKRTFMAERQYTRMEDWLTAKLAYEGLPSKTYLSKTLAQYTSKTCSNCGFTITSADYDRMLEKLKKTATGWMTTINGKELKVEGQITYYNRYKRQNVVKDLSVELDRLSEESVNNDISSWTKGRSGEALSLLKKRFSHRPVQEKFVCLNCGFETHADEQAALNIARSWLFLRSQEYKKYQTNKTTGNTDKRAFVETWQSFYRKKLKEVWKPAV

SEQ ID NO: 49668 - protein, 978 aa, synthetic construct
QEIKRINKIRRRLVKDSNTKKAGKTGPMKTLLVRVMTPDLRERLENLRKKPENIPQPISNTSRANLNKLLTDYTEMKKAILHVYWEEFQKDPVGLMSRVAQPASKKIDQNKLKPEMDEKGNLTTAGFACSQCGQPLFVYKLEQVSEKGKAYTNYFGRCNVAEHEKLILLAQLKPEKDSDEAVTYSLGKFGQRALDFYSIHVTKESTHPVKPLAQIAGNRYASGPVGKALSDACMGTIASFLSKYQDIIIEHQKVVKGNQKRLESLRELAGKENLEYPSVTLPPQPHTKEGVDAYNEVIARVRMWVNLNLWQKLKLSRDDAKPLLRLKGFPSFPLVERQANEVDWWDMVCNVKKLINEKKEDGKVFWQNLAGYKRQEALRPYLSSEEDRKKGKKFARYQLGDLLLHLEKKHGEDWGKVYDEAWERIDKKVEGLSKHIKLEEERRSEDAQSKAALTDWLRAKASFVIEGLKEADKDEFCRCELKLQKWYGDLRGKPFAIEAENSILDISGFSKQYNCAFIWQKDGVKKLNLYLIINYFKGGKLRFKKIKPEAFEANRFYTVINKKSGEIVPMEVNFNFDDPNLIILPLAFGKRQGREFIWNDLLSLETGSLKLANGRVIEKTLYNRRTRQDEPALFVALTFERREVLDSSNIKPMNLIGVDRGENIPAVIALTDPEGCPLSRFKDSLGNPTHILRIGESYKEKQRTIQAKKEVEQRRAGGYSRKYASKAKNLADDMVRNTARDLLYYAVTQDAMLIFENLSRGFGRQGKRTFMAERQYTRMEDWLTAKLAYEGLPSKTYLSKTLAQYTSKTCSNCGFTITSADYDRVLEKLKKTATGWMTTINGKELKVEGQITYYNRYKRQNVVKDLSVELDRLSEESVNNDISSWTKGRQGEALSLLKKRFSHRPVQEKFVCLNCGFETHADEQAALNIARSWLFLRSQEYKKYQTNKTTGNTDKRAFVETWQSFYRKKLKEVWKPAV

SEQ ID NO: 49669 - protein, 978 aa, synthetic construct
QEIKRINKIRRRLVKDSNTKKAGKTGPMKTLLVRVMTPDLRERLENLRKKPENIPQPISNTSRANLNKLLTDYTEMKKAILHVYWEEFQKDPVGLMSRVAQPASKKIDQNKLKPEMDEKGNLTTAGFACSQCGQPLFVYKLEQVSEKGKAYTNYFGRCNVAEHEKLILLAQLKPEKDSDEAVTYSLGKFGQRALDFYSIHVTKESTHPVKPLAQIAGNRYASGPVGKALSDACMGTIASFLSKYQDIIIEHQKVVKGNQKRLESLRELAGKENLEYPSVTLPPQPHTKEGVDAYNEVIARVRMWVNLNLWQKLKLSRDDAKPLLRLKGFPSFPLVERQANEVDWWDMVCNVKKLINEKKEDGKVFWQNLAGYKRQEALRPYLSSEEDRKKGKKFARYQLGDLLLHLEKKHGEDWGKVYDEAWERIDKKVEGLSKHIKLEEERRSEDAQSKAALTDWLRAKASFVIEGLKEADKDEFCRCELKLQKWYGDLRGKPFAIEAENSILDISGFSKQYNCAFIWQKDGVKKLNLYLIINYFKGGKLRFKKIKPEAFEANRFYTVINKKSGEIVPMEVNFNFDDPNLIILPLAFGKRQGREFIWNDLLSLETGSLKLANGRVIEKTLYNRRTRQDEPALFVALTFERREVLDSSNIKPMNLIGVDRGENIPAVIALTDPEGCPLSRFKDSLGNPTHILRIGESYKEKQRTIQAKKEVEQRRAGGYSRKYASKAKNLADDMVRNTARDLLYYAVTQDAMLIFENLSRGFGRQGKRTFMAERQYTRMEDWLTAKLAYEGLPSKTYLSKTLAQYTSKTCSNCGFTITSADYDRVLEKLKKTATGWMTTINGKELKVEGQITYYNRYKRQNVVKDLSVELDRLSEESVNNDISSWTKGRSGEALSLLKKRFSHRPVQEKFVCLNCEFETHADEQAALNIARSWLFLRSQEYKKYQTNKTTGNTDKRAFVETWQSFYRKKLKEVWKPAV

SEQ ID NO: 49670 - protein, 979 aa, synthetic construct
QEIKRINKIRRRLVKDSNTKKAGKTGPMKTLLVRVMTPDLRERLENLRKKPENIPQPISNTSRANLNKLLTDYTEMKKAILHVYWEEFQKDPVGLMSRVAQPASKKIDQNKLKPEMDEKGNLTTAGFACSQCGQPLFVYKLEQVSEKGKAYTNYFGRCNVAEHEKLILLAQLKPEKDSDEAVTYSLGKFGQRALDFYSIHVTKESTHPVKPLAQIAGNRYASGPVGKALSDACMGTIASFLSKYQDIIIEHQKVVKGNQKRLESLRELAGKENLEYPSVTLPPQPHTKEGVDAYNEVIARVRMWVNLNLWQKLKLSRDDAKPLLRLKGFPSFPLVERQANEVDWWDMVCNVKKLINEKKEDGKVFWQNLAGYKRQEALRPYLSSEEDRKKGKKFARYQLGDLLLHLEKKHGEDWGKVYDEAWERIDKKVEGLSKHIKLEEERRSEDAQSKAALTDWLRAKASFVIEGLKEADKDEFCRCELKLQKWYGDLRGKPFAIEAENSILDISGFSKQYNCAFIWQKDGVKKLNLYLIINYFKGGKLRFKKIKPEAFEANRFYTVINKKSGEIVPMEVNFNFDDPNLIILPLAFGKRQGREFIWNDLLSLETGSLKLANGRVIEKTLYNRRTRQDEPALFVALTFERREVLDSSNIKPMNLIGVDRGENIPAVIALTDPEGCPLSRFKDSLGNPTHILRIGESYKEKQRTIQAKKEVEQRRAGGYSRKYASKAKNLADDMVRNTARDLLYYAVTQDAMLIFENLSRGFGRQGKRTFMAERQYTRMEDWLTAKLAYEGLPSKTYLSKTLAQYTSKTCSNCGFTITSADYDRVLEKLKKTATGWMTTINGKELKVEGQITYYNRYKRQNVVKDLSVELDRLSEESVNNDISSWTKGRSGEALSLLKKRFSHRPVQEKFVCLNCGFETHADEQAALNIARSWLFLRSQEYKKYQTNKTSTGNTDKRAFVETWQSFYRKKLKEVWKPAV

SEQ ID NO: 49671 - protein, 979 aa, synthetic construct
QEIKRINKIRRRLVKDSNTKKAGKTGPMKTLLVRVMTPDLRERLENLRKKPENIPQPISNTSRANLNKLLTDYTEMKKAILHVYWEEFQKDPVGLMSRVAQPASKKIDQNKLKPEMDEKGNLTTAGFACSQCGQPLFVYKLEQVSEKGKAYTNYFGRCNVAEHEKLILLAQLKPEKDSDEAVTYSLGKFGQRALDFYSIHVTKESTHPVKPLAQIAGNRYASGPVGKALSDACMGTIASFLSKYQDIIIEHQKVVKGNQKRLESLRELAGKENLEYPSVTLPPQPHTKEGVDAYNEVIARVRMWVNLNLWQKLKLSRDDAKPLLRLKGFPSFPLVERQANEVDWWDMVCNVKKLINEKKEDGKVFWQNLAGYKRQEALRPYLSSEEDRKKGKKFARYQLGDLLLHLEKKHGEDWGKVYDEAWERIDKKVEGLSKHIKLEEERRSEDAQSKAALTDWLRAKASFVIEGLKEADKDEFCRCELKLQKWYGDLRGKPFAIEAENSILDISGFSKQYNCAFIWQKDGVKKLNLYLIINYFKGGKLRFKKIKPEAFEANRFYTVINKKSGEIVPMEVNFNFDDPNLIILPLAFGKRQGREFIWNDLLSLETGSLKLANGRVIEKTLYNRRTRQDEPALFVALTFERREVLDSSNIKPMNLIGVDRGENIPAVIALTDPEGCPLSRFKDSLGNPTHILRIGESYKEKQRTIQAKKEVEQRRAGGYSRKYASKAKNLADDMVRNTARDLLYYAVTQDAMLIFENLSRGFGRQGKRTFMAERQYTRMEDWLTAKLAYEGLPSKTYLSKTLAQYTSKTCSNCGFTITSADYDRVLEKLKKTATGWMTTINGKELKVEGQITYYNRYKRQNVVKDLSVELDRLSEESVNNDISSWTKGRSGEALSLLKKRFSHRPVQEKFVCLNCGFETHADEQAALNIARSWLFLRSQEYKKYQTNKTTGKNTDKRAFVETWQSFYRKKLKEVWKPAV

SEQ ID NO: 49672 - protein, 978 aa, synthetic construct
QEIKRINKIRRRLVKDSNTKKAGKTGPMKTLLVRVMTPDLRERLENLRKKPENIPQPISNTSRANLNKLLTDYTEMKKAILHVYWEEFQKDPVGLMSRVAQPASKKIDQNKLKPEMDEKGNLTTAGFACSQCGQPLFVYKLEQVSEKGKAYTNYFGRCNVAEHEKLILLAQLKPEKDSDEAVTYSLGKFGQRALDFYSIHVTKESTHPVKPLAQIAGNRYASGPVGKALSGACMGTIASFLSKYQDIIIEHQKVVKGNQKRLESLRELAGKENLEYPSVTLPPQPHTKEGVDAYNEVIARVRMWVNLNLWQKLKLSRDDAKPLLRLKGFPSFPLVERQANEVDWWDMVCNVKKLINEKKEDGKVFWQNLAGYKRQEALRPYLSSEEDRKKGKKFARYQLGDLLLHLEKKHGEDWGKVYDEAWERIDKKVEGLSKHIKLEEERRSEDAQSKAALTDWLRAKASFVIEGLKEADKDEFCRCELKLQKWYGDLRGKPFAIEAENSILDISGFSKQYNCAFIWQKDGVKKLNLYLIINYFKGGKLRFKKIKPEAFEANRFYTVINKKSGEIVPMEVNFNFDDPNLIILPLAFGKRQGREFIWNDLLSLETGSLKLANGRVIEKTLYNRRTRQDEPALFVALTFERREVLDSSNIKPMNLIGVDRGENIPAVIALTDPEGCPLSRFKDSLGNPTHILRIGESYKEKQRTIQAKKEVEQRRAGGYSRKYASKAKNLADDMVRNTARDLLYYAVTQDAMLIFENLSRGFGRQGKRTFMAERQYTRMEDWLTAKLAYEGLPSKTYLSKTLAQYTSKTCSNCGFTITSADYDRVLEKLKKTATGWMTTINGKELKVEGQITYYNRYKRQNVVKDLSVELDRLSEESVNNDISSWTKGRSGEALSLLKKRFSHRPVQEKFVCLNCGFETHADEQAALNIARSWLFLRSQEYKKYQTNKTTGNTDKRAFVETWQSFYRKKLKEVWKPAV

SEQ ID NO: 49673 - protein, 978 aa, synthetic construct
QEIKRINKIRRRLVKDSNTKKAGKTGPMKTLLVRVMTPDLRERLENLRKKPENIPQPISNTSRANLNKLLTDYTEMKKAILHVYWEEFQKDPVGLMSRVAQPASKKIDQNKLKPEMDEKGNLTTAGFACSQCGQPLFVYKLEQVSEKGKAYTNYFGRCNVAEHEKLILLAQLKPEKDSDEAVTYSLGKFGQRALDFYSIHVTKESTHPVKPLAQIAGNRYASGPVGKALSDACMGTIASFLSKYQDIIIEHQKVVKGNQKRLESLRELAGKENLEYPSVTLPPQPHTKEGVDAYNEVIARVRMWVNLNLWQKLKLSRDDAKPLLRLKNFPSFPLVERQANEVDWWDMVCNVKKLINEKKEDGKVFWQNLAGYKRQEALRPYLSSEEDRKKGKKFARYQLGDLLLHLEKKHGEDWGKVYDEAWERIDKKVEGLSKHIKLEEERRSEDAQSKAALTDWLRAKASFVIEGLKEADKDEFCRCELKLQKWYGDLRGKPFAIEAENSILDISGFSKQYNCAFIWQKDGVKKLNLYLIINYFKGGKLRFKKIKPEAFEANRFYTVINKKSGEIVPMEVNFNFDDPNLIILPLAFGKRQGREFIWNDLLSLETGSLKLANGRVIEKTLYNRRTRQDEPALFVALTFERREVLDSSNIKPMNLIGVDRGENIPAVIALTDPEGCPLSRFKDSLGNPTHILRIGESYKEKQRTIQAKKEVEQRRAGGYSRKYASKAKNLADDMVRNTARDLLYYAVTQDAMLIFENLSRGFGRQGKRTFMAERQYTRMEDWLTAKLAYEGLPSKTYLSKTLAQYTSKTCSNCGFTITSADYDRVLEKLKKTATGWMTTINGKELKVEGQITYYNRYKRQNVVKDLSVELDRLSEESVNNDISSWTKGRSGEALSLLKKRFSHRPVQEKFVCLNCGFETHADEQAALNIARSWLFLRSQEYKKYQTNKTTGNTDKRAFVETWQSFYRKKLKEVWKPAV

SEQ ID NO: 49674 - protein, 978 aa, synthetic construct
QEIKRINKIRRRLVKDSNTKKAGKTGPMKTLLVRVMTPDLRERLENLRKKPENIPQPISNTSRANLNKLLTDYTEMKKAILHVYWEEFQKDPVGLMSRVAQPASKKIDQNKLKPEMDEKGNLTTAGFACSQCGQPLFVYKLEQVSEKGKAYTNYFGRCNVAEHEKLILLAQLKPEKDSDEAVTYSLGKFGQRALDFYSIHVTKESTHPVKPLAQIAGNRYASGPVGKALSDACMGTIASFLSKYQDIIIEHQKVVKGNQKRLESLRELAGKENLEYPSVTLPPQPHTKEGVDAYNEVIARVRMWVNLNLWQKLKLSRDDAKPLLRLKGFPSFPLVERQANEVDWWDMVCNVKKLINEKKEDGKVFWQNLAGYKRQEALRPYLSSEEDRKKGKKFARYQLGDLLNHLEKKHGEDWGKVYDEAWERIDKKVEGLSKHIKLEEERRSEDAQSKAALTDWLRAKASFVIEGLKEADKDEFCRCELKLQKWYGDLRGKPFAIEAENSILDISGFSKQYNCAFIWQKDGVKKLNLYLIINYFKGGKLRFKKIKPEAFEANRFYTVINKKSGEIVPMEVNFNFDDPNLIILPLAFGKRQGREFIWNDLLSLETGSLKLANGRVIEKTLYNRRTRQDEPALFVALTFERREVLDSSNIKPMNLIGVDRGENIPAVIALTDPEGCPLSRFKDSLGNPTHILRIGESYKEKQRTIQAKKEVEQRRAGGYSRKYASKAKNLADDMVRNTARDLLYYAVTQDAMLIFENLSRGFGRQGKRTFMAERQYTRMEDWLTAKLAYEGLPSKTYLSKTLAQYTSKTCSNCGFTITSADYDRVLEKLKKTATGWMTTINGKELKVEGQITYYNRYKRQNVVKDLSVELDRLSEESVNNDISSWTKGRSGEALSLLKKRFSHRPVQEKFVCLNCGFETHADEQAALNIARSWLFLRSQEYKKYQTNKTTGNTDKRAFVETWQSFYRKKLKEVWKPAV

SEQ ID NO: 49675 - protein, 978 aa, synthetic construct
QEIKRINKIRRRLVKDSNTKKAGKTGPMKTLLVRVMTPDLRERLENLRKKPENIPQPISNTSRANLNKLLTDYTEMKKAILHVYWEEFQKDPVGLMSRVAQPASKKIDQNKLKPEMDEKGNLTTAGFACSQCGQPLFVYKLEQVSEKGKAYTNYFGRCNVAEHEKLILLAQLKPEKDSDEAVTYSLGKFGQRALDFYSIHVTKESTHPVKPLAQIAGNRYASGPVGKALSDACMGTIASFLSKYQDIIIEHQKVVKGNQKRLESLRELAGKENLEYPSVTLPPQPHTKEGVDAYNEVIARVRMWVNLNLWQKLKLSRDDAKPLLRLKGFPSFPLVERQANEVDWWDMVCNVKKLINEKKEDGKVFWQNLAGYKRQEALRPYLSSEEDRKKGKKFARYQLGDLLWHLEKKHGEDWGKVYDEAWERIDKKVEGLSKHIKLEEERRSEDAQSKAALTDWLRAKASFVIEGLKEADKDEFCRCELKLQKWYGDLRGKPFAIEAENSILDISGFSKQYNCAFIWQKDGVKKLNLYLIINYFKGGKLRFKKIKPEAFEANRFYTVINKKSGEIVPMEVNFNFDDPNLIILPLAFGKRQGREFIWNDLLSLETGSLKLANGRVIEKTLYNRRTRQDEPALFVALTFERREVLDSSNIKPMNLIGVDRGENIPAVIALTDPEGCPLSRFKDSLGNPTHILRIGESYKEKQRTIQAKKEVEQRRAGGYSRKYASKAKNLADDMVRNTARDLLYYAVTQDAMLIFENLSRGFGRQGKRTFMAERQYTRMEDWLTAKLAYEGLPSKTYLSKTLAQYTSKTCSNCGFTITSADYDRVLEKLKKTATGWMTTINGKELKVEGQITYYNRYKRQNVVKDLSVELDRLSEESVNNDISSWTKGRSGEALSLLKKRFSHRPVQEKFVCLNCGFETHADEQAALNIARSWLFLRSQEYKKYQTNKTTGNTDKRAFVETWQSFYRKKLKEVWKPAV

SEQ ID NO: 49676 - protein, 978 aa, synthetic construct
QEIKRINKIRRRLVKDSNTKKAGKTGPMKTLLVRVMTPDLRERLENLRKKPENIPQPISNTSRANLNKLLTDYTEMKKAILHVYWEEFQKDPVGLMSRVAQPASKKIDQNKLKPEMDEKGNLTTAGFACSQCGQPLFVYKLEQVSEKGKAYTNYFGRCNVAEHEKLILLAQLKPEKDSDEAVTYSLGKFGQRALDFYSIHVTKESTHPVKPLAQIAGNRYASGPVGKALSDACMGTIASFLSKYQDIIIEHQKVVKGNQKRLESLRELAGKENLEYPSVTLPPQPHTKEGVDAYNEVIARVRMWVNLNLWQKLKLSRDDAKPLLRLKGFPSFPLVERQANEVDWWDMVCNVKKLINEKKEDGKVFWQNLAGYKRQEALRPYLSSEEDRKKGKKFARYQLGDLLLHLYKKHGEDWGKVYDEAWERIDKKVEGLSKHIKLEEERRSEDAQSKAALTDWLRAKASFVIEGLKEADKDEFCRCELKLQKWYGDLRGKPFAIEAENSILDISGFSKQYNCAFIWQKDGVKKLNLYLIINYFKGGKLRFKKIKPEAFEANRFYTVINKKSGEIVPMEVNFNFDDPNLIILPLAFGKRQGREFIWNDLLSLETGSLKLANGRVIEKTLYNRRTRQDEPALFVALTFERREVLDSSNIKPMNLIGVDRGENIPAVIALTDPEGCPLSRFKDSLGNPTHILRIGESYKEKQRTIQAKKEVEQRRAGGYSRKYASKAKNLADDMVRNTARDLLYYAVTQDAMLIFENLSRGFGRQGKRTFMAERQYTRMEDWLTAKLAYEGLPSKTYLSKTLAQYTSKTCSNCGFTITSADYDRVLEKLKKTATGWMTTINGKELKVEGQITYYNRYKRQNVVKDLSVELDRLSEESVNNDISSWTKGRSGEALSLLKKRFSHRPVQEKFVCLNCGFETHADEQAALNIARSWLFLRSQEYKKYQTNKTTGNTDKRAFVETWQSFYRKKLKEVWKPAV

SEQ ID NO: 49677 - protein, 978 aa, synthetic construct
QEIKRINKIRRRLVKDSNTKKAGKTGPMKTLLVRVMTPDLRERLENLRKKPENIPQPISNTSRANLNKLLTDYTEMKKAILHVYWEEFQKDPVGLMSRVAQPASKKIDQNKLKPEMDEKGNLTTAGFACSQCGQPLFVYKLEQVSEKGKAYTNYFGRCNVAEHEKLILLAQLKPEKDSDEAVTYSLGKFGQRALDFYSIHVTKESTHPVKPLAQIAGNRYASGPVGKALSDACMGTIASFLSKYQDIIIEHQKVVKGNQKRLESLRELAGKENLEYPSVTLPPQPHTKEGVDAYNEVIARVRMWVNLNLWQKLKLSRDDAKPLLRLKGFPSFPLVERQANEVDWWDMVCNVKKLINEKKEDGKVFWQNLAGYKRQEALRPYLSSEEDRKKGKKFARYQLGDLLLHLEKKHPEDWGKVYDEAWERIDKKVEGLSKHIKLEEERRSEDAQSKAALTDWLRAKASFVIEGLKEADKDEFCRCELKLQKWYGDLRGKPFAIEAENSILDISGFSKQYNCAFIWQKDGVKKLNLYLIINYFKGGKLRFKKIKPEAFEANRFYTVINKKSGEIVPMEVNFNFDDPNLIILPLAFGKRQGREFIWNDLLSLETGSLKLANGRVIEKTLYNRRTRQDEPALFVALTFERREVLDSSNIKPMNLIGVDRGENIPAVIALTDPEGCPLSRFKDSLGNPTHILRIGESYKEKQRTIQAKKEVEQRRAGGYSRKYASKAKNLADDMVRNTARDLLYYAVTQDAMLIFENLSRGFGRQGKRTFMAERQYTRMEDWLTAKLAYEGLPSKTYLSKTLAQYTSKTCSNCGFTITSADYDRVLEKLKKTATGWMTTINGKELKVEGQITYYNRYKRQNVVKDLSVELDRLSEESVNNDISSWTKGRSGEALSLLKKRFSHRPVQEKFVCLNCGFETHADEQAALNIARSWLFLRSQEYKKYQTNKTTGNTDKRAFVETWQSFYRKKLKEVWKPAV

SEQ ID NO: 49678 - protein, 979 aa, synthetic construct
QEIKRINKIRRRLVKDSNTKKAGKTGPMKTLLVRVMTPDLRERLENLRKKPENIPQPISNTSRANLNKLLTDYTEMKKAILHVYWEEFQKDPVGLMSRVAQPASKKIDQNKLKPEMDEKGNLTTAGFACSQCGQPLFVYKLEQVSEKGKAYTNYFGRCNVAEHEKLILLAQLKPEKDSDEAVTYSLGKFGQRALDFYSIHVTKESTHPVKPLAQIAGNRYASGPVGKALSDACMGTIASFLSKYQDIIIEHQKVVKGNQKRLESLRELAGKENLEYPSVTLPPQPHTKEGVDAYNEVIARVRMWVNLNLWQKLKLSRDDAKPLLRLKGFPSFPLVERQANEVDWWDMVCNVKKLINEKKEDGKVFWQNLAGYKRQEALRPYLSSEEDRKKGKKFARYQLGDLLLHLEKKHGERDWGKVYDEAWERIDKKVEGLSKHIKLEEERRSEDAQSKAALTDWLRAKASFVIEGLKEADKDEFCRCELKLQKWYGDLRGKPFAIEAENSILDISGFSKQYNCAFIWQKDGVKKLNLYLIINYFKGGKLRFKKIKPEAFEANRFYTVINKKSGEIVPMEVNFNFDDPNLIILPLAFGKRQGREFIWNDLLSLETGSLKLANGRVIEKTLYNRRTRQDEPALFVALTFERREVLDSSNIKPMNLIGVDRGENIPAVIALTDPEGCPLSRFKDSLGNPTHILRIGESYKEKQRTIQAKKEVEQRRAGGYSRKYASKAKNLADDMVRNTARDLLYYAVTQDAMLIFENLSRGFGRQGKRTFMAERQYTRMEDWLTAKLAYEGLPSKTYLSKTLAQYTSKTCSNCGFTITSADYDRVLEKLKKTATGWMTTINGKELKVEGQITYYNRYKRQNVVKDLSVELDRLSEESVNNDISSWTKGRSGEALSLLKKRFSHRPVQEKFVCLNCGFETHADEQAALNIARSWLFLRSQEYKKYQTNKTTGNTDKRAFVETWQSFYRKKLKEVWKPAV

SEQ ID NO: 49679 - protein, 979 aa, synthetic construct
QEIKRINKIRRRLVKDSNTKKAGKTGPMKTLLVRVMTPDLRERLENLRKKPENIPQPISNTSRANLNKLLTDYTEMKKAILHVYWEEFQKDPVGLMSRVAQPASKKIDQNKLKPEMDEKGNLTTAGFACSQCGQPLFVYKLEQVSEKGKAYTNYFGRCNVAEHEKLILLAQLKPEKDSDEAVTYSLGKFGQRALDFYSIHVTKESTHPVKPLAQIAGNRYASGPVGKALSDACMGTIASFLSKYQDIIIEHQKVVKGNQKRLESLRELAGKENLEYPSVTLPPQPHTKEGVDAYNEVIARVRMWVNLNLWQKLKLSRDDAKPLLRLKGFPSFPLVERQANEVDWWDMVCNVKKLINEKKEDGKVFWQNLAGYKRQEALRPYLSSEEDRKKGKKFARYQLGDLLLHLEKKHGEYDWGKVYDEAWERIDKKVEGLSKHIKLEEERRSEDAQSKAALTDWLRAKASFVIEGLKEADKDEFCRCELKLQKWYGDLRGKPFAIEAENSILDISGFSKQYNCAFIWQKDGVKKLNLYLIINYFKGGKLRFKKIKPEAFEANRFYTVINKKSGEIVPMEVNFNFDDPNLIILPLAFGKRQGREFIWNDLLSLETGSLKLANGRVIEKTLYNRRTRQDEPALFVALTFERREVLDSSNIKPMNLIGVDRGENIPAVIALTDPEGCPLSRFKDSLGNPTHILRIGESYKEKQRTIQAKKEVEQRRAGGYSRKYASKAKNLADDMVRNTARDLLYYAVTQDAMLIFENLSRGFGRQGKRTFMAERQYTRMEDWLTAKLAYEGLPSKTYLSKTLAQYTSKTCSNCGFTITSADYDRVLEKLKKTATGWMTTINGKELKVEGQITYYNRYKRQNVVKDLSVELDRLSEESVNNDISSWTKGRSGEALSLLKKRFSHRPVQEKFVCLNCGFETHADEQAALNIARSWLFLRSQEYKKYQTNKTTGNTDKRAFVETWQSFYRKKLKEVWKPAV

SEQ ID NO: 49680 - protein, 978 aa, synthetic construct
QEIKRINKIRRRLVKDSNTKKAGKTGPMKTLLVRVMTPDLRERLENLRKKPENIPQPISNTSRANLNKLLTDYTEMKKAILHVYWEEFQKDPVGLMSRVAQPASKKIDQNKLKPEMDEKGNLTTAGFACSQCGQPLFVYKLEQVSEKGKAYTNYFGRCNVAEHEKLILLAQLKPEKDSDEAVTYSLGKFGQRALDFYSIHVTKESTHPVKPLAQIAGNRYASGPVGKALSDACMGTIASFLSKYQDIIIEHQKVVKGNQKRLESLRELAGKENLEYPSVTLPPQPHTKEGVDAYNEVIARVRMWVNLNLWQKLKLSRDDAKPLLRLKGFPSFPLVERQANEVDWWDMVCNVKKLINEKKEDGKVFWQNLAGYKRQEALRPYLSSEEDRKKGKKFARYQLGDLLLHLEKKHGEDWGDVYDEAWERIDKKVEGLSKHIKLEEERRSEDAQSKAALTDWLRAKASFVIEGLKEADKDEFCRCELKLQKWYGDLRGKPFAIEAENSILDISGFSKQYNCAFIWQKDGVKKLNLYLIINYFKGGKLRFKKIKPEAFEANRFYTVINKKSGEIVPMEVNFNFDDPNLIILPLAFGKRQGREFIWNDLLSLETGSLKLANGRVIEKTLYNRRTRQDEPALFVALTFERREVLDSSNIKPMNLIGVDRGENIPAVIALTDPEGCPLSRFKDSLGNPTHILRIGESYKEKQRTIQAKKEVEQRRAGGYSRKYASKAKNLADDMVRNTARDLLYYAVTQDAMLIFENLSRGFGRQGKRTFMAERQYTRMEDWLTAKLAYEGLPSKTYLSKTLAQYTSKTCSNCGFTITSADYDRVLEKLKKTATGWMTTINGKELKVEGQITYYNRYKRQNVVKDLSVELDRLSEESVNNDISSWTKGRSGEALSLLKKRFSHRPVQEKFVCLNCGFETHADEQAALNIARSWLFLRSQEYKKYQTNKTTGNTDKRAFVETWQSFYRKKLKEVWKPAV

SEQ ID NO: 49681 - protein, 978 aa, synthetic construct
QEIKRINKIRRRLVKDSNTKKAGKTGPMKTLLVRVMTPDLRERLENLRKKPENIPQPISNTSRANLNKLLTDYTEMKKAILHVYWEEFQKDPVGLMSRVAQPASKKIDQNKLKPEMDEKGNLTTAGFACSQCGQPLFVYKLEQVSEKGKAYTNYFGRCNVAEHEKLILLAQLKPEKDSDEAVTYSLGKFGQRALDFYSIHVTKESTHPVKPLAQIAGNRYASGPVGKALSDACMGTIASFLSKYQDIIIEHQKVVKGNQKRLESLRELAGKENLEYPSVTLPPQPHTKEGVDAYNEVIARVRMWVNLNLWQKLKLSRDDAKPLLRLKGFPSFPLVERQANEVDWWDMVCNVKKLINEKKEDGKVFWQNLAGYKRQEALRPYLSSEEDRKKGKKFARYQLGDLLLHLEKKHGEDWGKVYGEAWERIDKKVEGLSKHIKLEEERRSEDAQSKAALTDWLRAKASFVIEGLKEADKDEFCRCELKLQKWYGDLRGKPFAIEAENSILDISGFSKQYNCAFIWQKDGVKKLNLYLIINYFKGGKLRFKKIKPEAFEANRFYTVINKKSGEIVPMEVNFNFDDPNLIILPLAFGKRQGREFIWNDLLSLETGSLKLANGRVIEKTLYNRRTRQDEPALFVALTFERREVLDSSNIKPMNLIGVDRGENIPAVIALTDPEGCPLSRFKDSLGNPTHILRIGESYKEKQRTIQAKKEVEQRRAGGYSRKYASKAKNLADDMVRNTARDLLYYAVTQDAMLIFENLSRGFGRQGKRTFMAERQYTRMEDWLTAKLAYEGLPSKTYLSKTLAQYTSKTCSNCGFTITSADYDRVLEKLKKTATGWMTTINGKELKVEGQITYYNRYKRQNVVKDLSVELDRLSEESVNNDISSWTKGRSGEALSLLKKRFSHRPVQEKFVCLNCGFETHADEQAALNIARSWLFLRSQEYKKYQTNKTTGNTDKRAFVETWQSFYRKKLKEVWKPAV

SEQ ID NO: 49682 - protein, 978 aa, synthetic construct
QEIKRINKIRRRLVKDSNTKKAGKTGPMKTLLVRVMTPDLRERLENLRKKPENIPQPISNTSRANLNKLLTDYTEMKKAILHVYWEEFQKDPVGLMSRVAQPASKKIDQNKLKPEMDEKGNLTTAGFACSQCGQPLFVYKLEQVSEKGKAYTNYFGRCNVAEHEKLILLAQLKPEKDSDEAVTYSLGKFGQRALDFYSIHVTKESTHPVKPLAQIAGNRYASGPVGKALSDACMGTIASFLSKYQDIIIEHQKVVKGNQKRLESLRELAGKENLEYPSVTLPPQPHTKEGVDAYNEVIARVRMWVNLNLWQKLKLSRDDAKPLLRLKGFPSFPLVERQANEVDWWDMVCNVKKLINEKKEDGKVFWQNLAGYKRQEALRPYLSSEEDRKKGKKFARYQLGDLLLHLEKKHGEDWGKVYDEAWERIDKKVEGLSKHIKLEEERRSEDAQSKAALTDWLRAKASFVIEGKKEADKDEFCRCELKLQKWYGDLRGKPFAIEAENSILDISGFSKQYNCAFIWQKDGVKKLNLYLIINYFKGGKLRFKKIKPEAFEANRFYTVINKKSGEIVPMEVNFNFDDPNLIILPLAFGKRQGREFIWNDLLSLETGSLKLANGRVIEKTLYNRRTRQDEPALFVALTFERREVLDSSNIKPMNLIGVDRGENIPAVIALTDPEGCPLSRFKDSLGNPTHILRIGESYKEKQRTIQAKKEVEQRRAGGYSRKYASKAKNLADDMVRNTARDLLYYAVTQDAMLIFENLSRGFGRQGKRTFMAERQYTRMEDWLTAKLAYEGLPSKTYLSKTLAQYTSKTCSNCGFTITSADYDRVLEKLKKTATGWMTTINGKELKVEGQITYYNRYKRQNVVKDLSVELDRLSEESVNNDISSWTKGRSGEALSLLKKRFSHRPVQEKFVCLNCGFETHADEQAALNIARSWLFLRSQEYKKYQTNKTTGNTDKRAFVETWQSFYRKKLKEVWKPAV

SEQ ID NO: 49683 - protein, 978 aa, synthetic construct
QEIKRINKIRRRLVKDSNTKKAGKTGPMKTLLVRVMTPDLRERLENLRKKPENIPQPISNTSRANLNKLLTDYTEMKKAILHVYWEEFQKDPVGLMSRVAQPASKKIDQNKLKPEMDEKGNLTTAGFACSQCGQPLFVYKLEQVSEKGKAYTNYFGRCNVAEHEKLILLAQLKPEKDSDEAVTYSLGKFGQRALDFYSIHVTKESTHPVKPLAQIAGNRYASGPVGKALSDACMGTIASFLSKYQDIIIEHQKVVKGNQKRLESLRELAGKENLEYPSVTLPPQPHTKEGVDAYNEVIARVRMWVNLNLWQKLKLSRDDAKPLLRLKGFPSFPLVERQANEVDWWDMVCNVKKLINEKKEDGKVFWQNLAGYKRQEALRPYLSSEEDRKKGKKFARYQLGDLLLHLEKKHGEDWGKVYDEAWERIDKKVEGLSKHIKLEEERRSEDAQSKAALTDWLRAKASFVIEGSKEADKDEFCRCELKLQKWYGDLRGKPFAIEAENSILDISGFSKQYNCAFIWQKDGVKKLNLYLIINYFKGGKLRFKKIKPEAFEANRFYTVINKKSGEIVPMEVNFNFDDPNLIILPLAFGKRQGREFIWNDLLSLETGSLKLANGRVIEKTLYNRRTRQDEPALFVALTFERREVLDSSNIKPMNLIGVDRGENIPAVIALTDPEGCPLSRFKDSLGNPTHILRIGESYKEKQRTIQAKKEVEQRRAGGYSRKYASKAKNLADDMVRNTARDLLYYAVTQDAMLIFENLSRGFGRQGKRTFMAERQYTRMEDWLTAKLAYEGLPSKTYLSKTLAQYTSKTCSNCGFTITSADYDRVLEKLKKTATGWMTTINGKELKVEGQITYYNRYKRQNVVKDLSVELDRLSEESVNNDISSWTKGRSGEALSLLKKRFSHRPVQEKFVCLNCGFETHADEQAALNIARSWLFLRSQEYKKYQTNKTTGNTDKRAFVETWQSFYRKKLKEVWKPAV

SEQ ID NO: 49684 - protein, 979 aa, synthetic construct
QEIKRINKIRRRLVKDSNTKKAGKTGPMKTLLVRVMTPDLRERLENLRKKPENIPQPISNTSRANLNKLLTDYTEMKKAILHVYWEEFQKDPVGLMSRVAQPASKKIDQNKLKPEMDEKGNLTTAGFACSQCGQPLFVYKLEQVSEKGKAYTNYFGRCNVAEHEKLILLAQLKPEKDSDEAVTYSLGKFGQRALDFYSIHVTKESTHPVKPLAQIAGNRYASGPVGKALSDACMGTIASFLSKYQDIIIEHQKVVKGNQKRLESLRELAGKENLEYPSVTLPPQPHTKEGVDAYNEVIARVRMWVNLNLWQKLKLSRDDAKPLLRLKGFPSFPLVERQANEVDWWDMVCNVKKLINEKKEDGKVFWQNLAGYKRQEALRPYLSSEEDRKKGKKFARYQLGDLLLHLEKKHGEDWGKVYDEAWERIDKKVEGLSKHIKLEEERRSEDAQSKAALTDWLRAKASFVIEGLKEADDKDEFCRCELKLQKWYGDLRGKPFAIEAENSILDISGFSKQYNCAFIWQKDGVKKLNLYLIINYFKGGKLRFKKIKPEAFEANRFYTVINKKSGEIVPMEVNFNFDDPNLIILPLAFGKRQGREFIWNDLLSLETGSLKLANGRVIEKTLYNRRTRQDEPALFVALTFERREVLDSSNIKPMNLIGVDRGENIPAVIALTDPEGCPLSRFKDSLGNPTHILRIGESYKEKQRTIQAKKEVEQRRAGGYSRKYASKAKNLADDMVRNTARDLLYYAVTQDAMLIFENLSRGFGRQGKRTFMAERQYTRMEDWLTAKLAYEGLPSKTYLSKTLAQYTSKTCSNCGFTITSADYDRVLEKLKKTATGWMTTINGKELKVEGQITYYNRYKRQNVVKDLSVELDRLSEESVNNDISSWTKGRSGEALSLLKKRFSHRPVQEKFVCLNCGFETHADEQAALNIARSWLFLRSQEYKKYQTNKTTGNTDKRAFVETWQSFYRKKLKEVWKPAV

SEQ ID NO: 49685 - protein, 979 aa, synthetic construct
QEIKRINKIRRRLVKDSNTKKAGKTGPMKTLLVRVMTPDLRERLENLRKKPENIPQPISNTSRANLNKLLTDYTEMKKAILHVYWEEFQKDPVGLMSRVAQPASKKIDQNKLKPEMDEKGNLTTAGFACSQCGQPLFVYKLEQVSEKGKAYTNYFGRCNVAEHEKLILLAQLKPEKDSDEAVTYSLGKFGQRALDFYSIHVTKESTHPVKPLAQIAGNRYASGPVGKALSDACMGTIASFLSKYQDIIIEHQKVVKGNQKRLESLRELAGKENLEYPSVTLPPQPHTKEGVDAYNEVIARVRMWVNLNLWQKLKLSRDDAKPLLRLKGFPSFPLVERQANEVDWWDMVCNVKKLINEKKEDGKVFWQNLAGYKRQEALRPYLSSEEDRKKGKKFARYQLGDLLLHLEKKHGEDWGKVYDEAWERIDKKVEGLSKHIKLEEERRSEDAQSKAALTDWLRAKASFVIEGLKEADKDEFCRCELKLQKWYGDLRGKPFAIEAENSILDISGFSKQYNCAFIWQKDGVKKLNLYLIINYFKGGKLRFKKIKPEAFEANRFYTVINKKSGEIVPMEVNFNFDDPNLIILPLAFGKRQGREFIWNDLLSLETGSLKLANGRVIEKTLYNRRTRQDEPALFVALTFERREVLDSSNIKPMNLIGVDRGENIPAVIALTDPEGCPLSRFKDSLGNPTHILRIGESYKEKQRTIQAKKEVEQRRAGGYSRKYASKAKNLADDMVRNTARDLLYYAVTQDAMLIFENLSRGFGRQGKRTFMAERQYTRMEDWLTAKLAYEGLPSKTYLSKTLAQYTSKTCSNCGFTITSADYDRVLEKLKKTATGWMTTINGKELKVEGQITYYNRYKRQNVVKDLSVELDRLSEESVNNDISSWTKGRSGNEALSLLKKRFSHRPVQEKFVCLNCGFETHADEQAALNIARSWLFLRSQEYKKYQTNKTTGNTDKRAFVETWQSFYRKKLKEVWKPAV

SEQ ID NO: 49686 - protein, 978 aa, synthetic construct
QEIKRINKIRRRLVKDSNTKKAGKTGPMKTLLVRVMTPDLRERLENLRKKPENIPQPISNTSRANLNKLLTDYTEMKKAILHVYWEEFQKDPVGLMSRVAQPASKKIDQNKLKPEMDEKGNLTTAGFACSQCGQPLFVYKLEQVSEKGKAYTNYFGRCNVAEHEKLILLAQLKPEKDSDEAVTYSLGKFGQRALDFYSIHVTKESTHPVKPLAQIAGNRYASGPVGKALSDACMGTIASFLSKYQDIIIEHQKVVKGNQKRLESLRELAGKENLEYPSVTLPPQPHTKEGVDAYNEVIARVRMWVNLNLWQKLKLSRDDAKPLLRLKGFPSFPLVERQANEVDWWDMVCNVKKLINEKKEDGKVFWQNLAGYKRQEALRPYLSSEEDRQKGKKFARYQLGDLLLHLEKKHGEDWGKVYDEAWERIDKKVEGLSKHIKLEEERRSEDAQSKAALTDWLRAKASFVIEGLKEADKDEFCRCELKLQKWYGDLRGKPFAIEAENSILDISGFSKQYNCAFIWQKDGVKKLNLYLIINYFKGGKLRFKKIKPEAFEANRFYTVINKKSGEIVPMEVNFNFDDPNLIILPLAFGKRQGREFIWNDLLSLETGSLKLANGRVIEKTLYNRRTRQDEPALFVALTFERREVLDSSNIKPMNLIGVDRGENIPAVIALTDPEGCPLSRFKDSLGNPTHILRIGESYKEKQRTIQAKKEVEQRRAGGYSRKYASKAKNLADDMVRNTARDLLYYAVTQDAMLIFENLSRGFGRQGKRTFMAERQYTRMEDWLTAKLAYEGLPSKTYLSKTLAQYTSKTCSNCGFTITSADYDRVLEKLKKTATGWMTTINGKELKVEGQITYYNRYKRQNVVKDLSVELDRLSEESVNNDISSWTKGRSGEALSLLKKRFSHRPVQEKFVCLNCGFETHADEQAALNIARSWLFLRSQEYKKYQTNKTTGNTDKRAFVETWQSFYRKKLKEVWKPAV

SEQ ID NO: 49687 - protein, 978 aa, synthetic construct
QEIKRINKIRRRLVKDSNTKKAGKTGPMKTLLVRVMTPDLRERLENLRKKPENIPQPISNTSRANLNKLLTDYTEMKKAILHVYWEEFQKDPVGLMSRVAQPASKKIDQNKLKPEMDEKGNLTTAGFACSQCGQPLFVYKLEQVSEKGKAYTNYFGRCNVAEHEKLILLAQLKPEKDSDEAVTYSLGKFGQRALDFYSIHVTKESTHPVKPLAQIAGNRYASGPVGKALSDACMGTIASFLSKYQDIIIEHQKVVKGNQKRLESLRELAGKENLEYPSVTLPPQPHTKEGVDAYNEVIARVRMWVNLNLWQKLKLSRDDAKPLLRLKGFPSFPLVERQANEVDWWDMVCNVKKLINEKKEDGKVFWQNLAGYKRQEALRPYLSSEEDRKKGKKFARYQLGDLLLHLEKKHGEDWGKVYDEAWERIDKKVEGLSKHIKLEEERRSEDAQSKAALTDWLRAKASFVIEGLKEADKDEFCRCELKLQKWYGDLRGKPFAIEAENSILDISGFSKQYNCAFIWQKDGVKKLNLYLIINYFKGGKLRFKKIKPEAFEANRFYTVINKKSGEIVPMEVNFNFDDPNLIILPLAFGKRQGREFIWNDLLSLETGSLKLANGRVIEKTLYNRRTRQDEPALFVALTFERREVLDSSNIKPMNLIGVDRGENIPAVIALTDPEGCPLSRFKDSLGNPTHILRIGESYKEKQRTIQAKKEVEQRRAGGYSRKYASKAKNLADDMVRNTARDLLYYAVTQDAMLIFENLSRGFGRQGKRTFMAERQYTRMEDWLTAKLAYEGLPSQTYLSKTLAQYTSKTCSNCGFTITSADYDRVLEKLKKTATGWMTTINGKELKVEGQITYYNRYKRQNVVKDLSVELDRLSEESVNNDISSWTKGRSGEALSLLKKRFSHRPVQEKFVCLNCGFETHADEQAALNIARSWLFLRSQEYKKYQTNKTTGNTDKRAFVETWQSFYRKKLKEVWKPAV

SEQ ID NO: 49688 - protein, 978 aa, synthetic construct
QEIKRINKIRRRLVKDSNTKKAGKTGPMKTLLVRVMTPDLRERLENLRKKPENIPQPISNTSRANLNKLLTDYTEMKKAILHVYWEEFQKDPVGLMSRVAQPASKKIDQNKLKPEMDEKGNLTTAGFACSQCGQPLFVYKLEQVSEKGKAYTNYFGRCNVAEHEKLILLAQLKPEKDSDEAVTYSLGKFGQRALDFYSIHVTKESTHPVKPLAQIAGNRYASGPVGKALSDACMGTIASFLSKYQDIIIEHQKVVKGNQKRLESLRELAGKENLEYPSVTLPPQPHTKEGVDAYNEVIARVRMWVNLNLWQKLKLSRDDAKPLLRLKGFPSFPLVERQANEVDWWDMVCNVKKLINEKKEDGKVFWQNLAGYKRQEALRPYLSSEEDRKKGKKFARYQLGDLLLHLEKKHGEDWGKVYDEAWERIDKKVEGLSKHIKLEEERRSEDAQSKAALTDWLRAKASFVIEGLKEADKDEFCRCELKLQKWYGDLRGKPFAIEAENSILDISGFSKQYNCAFIWQKDGVKKLNLYLIINYFKGGKLRFKKIKPEAFEANRFYTVINKKSGEIVPMEVNFNFDDPNLIILPLAFGKRQGREFIWNDLLSLETGSLKLANGRVIEKTLYNRRTRQDEPALFVALTFERREVLDSSNIKPMNLIGVDRGENIPAVIALTDPEGCPLSRFKDSLGNPTHILRIGESYKEKQRTIQAKKEVEQRRAGGYSRKYASKAKNLADDMVRNTARDLLYYAVTQDAMLIFENLSRGFGRQGKRTFMAERQYTRMEDWLTAKLAYNGLPSKTYLSKTLAQYTSKTCSNCGFTITSADYDRVLEKLKKTATGWMTTINGKELKVEGQITYYNRYKRQNVVKDLSVELDRLSEESVNNDISSWTKGRSGEALSLLKKRFSHRPVQEKFVCLNCGFETHADEQAALNIARSWLFLRSQEYKKYQTNKTTGNTDKRAFVETWQSFYRKKLKEVWKPAV

SEQ ID NO: 49689 - protein, 978 aa, synthetic construct
QEIKRINKIRRRLVKDSNTKKAGKTGPMKTLLVRVMTPDLRERLENLRKKPENIPQPISNTSRANLNKLLTDYTEMKKAILHVYWEEFQKDPVGLMSRVAQPASKKIDQNKLKPEMDEKGNLTTAGFACSQCGQPLFVYKLEQVSEKGKAYTNYFGRCNVAEHEKLIQLAQLKPEKDSDEAVTYSLGKFGQRALDFYSIHVTKESTHPVKPLAQIAGNRYASGPVGKALSDACMGTIASFLSKYQDIIIEHQKVVKGNQKRLESLRELAGKENLEYPSVTLPPQPHTKEGVDAYNEVIARVRMWVNLNLWQKLKLSRDDAKPLLRLKGFPSFPLVERQANEVDWWDMVCNVKKLINEKKEDGKVFWQNLAGYKRQEALRPYLSSEEDRKKGKKFARYQLGDLLLHLEKKHGEDWGKVYDEAWERIDKKVEGLSKHIKLEEERRSEDAQSKAALTDWLRAKASFVIEGLKEADKDEFCRCELKLQKWYGDLRGKPFAIEAENSILDISGFSKQYNCAFIWQKDGVKKLNLYLIINYFKGGKLRFKKIKPEAFEANRFYTVINKKSGEIVPMEVNFNFDDPNLIILPLAFGKRQGREFIWNDLLSLETGSLKLANGRVIEKTLYNRRTRQDEPALFVALTFERREVLDSSNIKPMNLIGVDRGENIPAVIALTDPEGCPLSRFKDSLGNPTHILRIGESYKEKQRTIQAKKEVEQRRAGGYSRKYASKAKNLADDMVRNTARDLLYYAVTQDAMLIFENLSRGFGRQGKRTFMAERQYTRMEDWLTAKLAYEGLPSKTYLSKTLAQYTSKTCSNCGFTITSADYDRVLEKLKKTATGWMTTINGKELKVEGQITYYNRYKRQNVVKDLSVELDRLSEESVNNDISSWTKGRSGEALSLLKKRFSHRPVQEKFVCLNCGFETHADEQAALNIARSWLFLRSQEYKKYQTNKTTGNTDKRAFVETWQSFYRKKLKEVWKPAV

SEQ ID NO: 49690 - protein, 978 aa, synthetic construct
QEIKRINKIRRRLVKDSNTKKAGKTGPMKTLLVRVMTPDLRERLENLRKKPENIPQPISNTSRANLNKLLTDYTEMKKAILHVYWEEFQKDPVGLMSRVAQPASKKIDQNKLKPEMDEKGNLTTAGFACSQCGQPLFVYKLEQVSEKGKAYTNYFGRCNVAEHEKLILLAQLKPEKDSDEAVTYSLGKFGQRALDFYSIHVTKESTHPVKPLAQIAGNRYMSGPVGKALSDACMGTIASFLSKYQDIIIEHQKVVKGNQKRLESLRELAGKENLEYPSVTLPPQPHTKEGVDAYNEVIARVRMWVNLNLWQKLKLSRDDAKPLLRLKGFPSFPLVERQANEVDWWDMVCNVKKLINEKKEDGKVFWQNLAGYKRQEALRPYLSSEEDRKKGKKFARYQLGDLLLHLEKKHGEDWGKVYDEAWERIDKKVEGLSKHIKLEEERRSEDAQSKAALTDWLRAKASFVIEGLKEADKDEFCRCELKLQKWYGDLRGKPFAIEAENSILDISGFSKQYNCAFIWQKDGVKKLNLYLIINYFKGGKLRFKKIKPEAFEANRFYTVINKKSGEIVPMEVNFNFDDPNLIILPLAFGKRQGREFIWNDLLSLETGSLKLANGRVIEKTLYNRRTRQDEPALFVALTFERREVLDSSNIKPMNLIGVDRGENIPAVIALTDPEGCPLSRFKDSLGNPTHILRIGESYKEKQRTIQAKKEVEQRRAGGYSRKYASKAKNLADDMVRNTARDLLYYAVTQDAMLIFENLSRGFGRQGKRTFMAERQYTRMEDWLTAKLAYEGLPSKTYLSKTLAQYTSKTCSNCGFTITSADYDRVLEKLKKTATGWMTTINGKELKVEGQITYYNRYKRQNVVKDLSVELDRLSEESVNNDISSWTKGRSGEALSLLKKRFSHRPVQEKFVCLNCGFETHADEQAALNIARSWLFLRSQEYKKYQTNKTTGNTDKRAFVETWQSFYRKKLKEVWKPAV

SEQ ID NO: 49691 - protein, 978 aa, synthetic construct
QEIKRINKIRRRLVKDSNTKKAGKTGPMKTLLVRVMTPDLRERLENLRKKPENIPQPISNTSRANLNKLLTDYTEMKKAILHVYWEEFQKDPVGLMSRVAQPASKKIDQNKLKPEMDEKGNLTTAGFACSQCGQPLFVYKLEQVSEKGKAYTNYFGRCNVAEHEKLILLAQLKPEKDSDEAVTYSLGKFGQRALDFYSIHVTKESTHPVKPLAQIAGNRYASGPVGKALSDACMGTIASFLSKYQDIIIEHQKVVKGNQKRLESLRELAGKENLEYPSVTLPPQPHTKEGVDAYNEVIARVRMWVNLNLWQKLKLSRDDAKPLLRLKGFPSFPLVERQANEVDWWDMVCNVKKLINEKKEDGKVFWQNLAGYKRQEALRPYLSSEEDREKGKKFARYQLGDLLLHLEKKHGEDWGKVYDEAWERIDKKVEGLSKHIKLEEERRSEDAQSKAALTDWLRAKASFVIEGLKEADKDEFCRCELKLQKWYGDLRGKPFAIEAENSILDISGFSKQYNCAFIWQKDGVKKLNLYLIINYFKGGKLRFKKIKPEAFEANRFYTVINKKSGEIVPMEVNFNFDDPNLIILPLAFGKRQGREFIWNDLLSLETGSLKLANGRVIEKTLYNRRTRQDEPALFVALTFERREVLDSSNIKPMNLIGVDRGENIPAVIALTDPEGCPLSRFKDSLGNPTHILRIGESYKEKQRTIQAKKEVEQRRAGGYSRKYASKAKNLADDMVRNTARDLLYYAVTQDAMLIFENLSRGFGRQGKRTFMAERQYTRMEDWLTAKLAYEGLPSKTYLSKTLAQYTSKTCSNCGFTITSADYDRVLEKLKKTATGWMTTINGKELKVEGQITYYNRYKRQNVVKDLSVELDRLSEESVNNDISSWTKGRSGEALSLLKKRFSHRPVQEKFVCLNCGFETHADEQAALNIARSWLFLRSQEYKKYQTNKTTGNTDKRAFVETWQSFYRKKLKEVWKPAV

SEQ ID NO: 49692 - protein, 978 aa, synthetic construct
QEIKRINKIRRRLVKDSNTKKAGKTGPMKTLLVRVMTPDLRERLENLRKKPENIPQPISNTSRANLNKLLTDYTEMKKAILHVYWEEFQKDPVGLMSRVAQPASKKIDQNKLKPEMDEKGNLTTAGFACSQCGQPLFVYKLEQVSEKGKAYTNYFGRCNVAEHEKLILLAQLKPEKDSDEAVTYSLGKFGQRALDFYSIHVTKESTHPVKPLAQIAGNRYASGPVGKALSDACMGTIASFLSKYQDIIIEHQKVVKGNQKRLESLRELAGKENLEYPSVTLPPQPHTKEGVDAYNEVIARVRMWVNLNLWQKLKLSRDDAKPLLRLKGFPSFPLVERQANEVDWWDMVCNVKKLINEKKEDGKVFWQNLAGYKRQEALRPYLSSEEDRKKGKKFARYQLGDLLLHLEKKHGEDWGKVYDEAWERIDKKVEGLSKHIKLEEERRSEDAQSKAALTDWLRAKASFVIEGLKEADKDEFCRCELKLQKWYGDLRGKPFAIEAENSILDISGFSKQYNCAFIWQKDGVKKLNLYLIINYFKGGKLRFKKIKPEAFEANRFYTVINKKSGEIVIMEVNFNFDDPNLIILPLAFGKRQGREFIWNDLLSLETGSLKLANGRVIEKTLYNRRTRQDEPALFVALTFERREVLDSSNIKPMNLIGVDRGENIPAVIALTDPEGCPLSRFKDSLGNPTHILRIGESYKEKQRTIQAKKEVEQRRAGGYSRKYASKAKNLADDMVRNTARDLLYYAVTQDAMLIFENLSRGFGRQGKRTFMAERQYTRMEDWLTAKLAYEGLPSKTYLSKTLAQYTSKTCSNCGFTITSADYDRVLEKLKKTATGWMTTINGKELKVEGQITYYNRYKRQNVVKDLSVELDRLSEESVNNDISSWTKGRSGEALSLLKKRFSHRPVQEKFVCLNCGFETHADEQAALNIARSWLFLRSQEYKKYQTNKTTGNTDKRAFVETWQSFYRKKLKEVWKPAV

SEQ ID NO: 49693 - protein, 978 aa, synthetic construct
QEIKRINKIRRRLVKDSNTKKAGKTGPMKTLLVRVMTPDLRERLENLRKKPENIPQPISNTSRANLNKLLTDYTEMKKAILHVYWEEFQKDPVGLMSRVAQPASKKIDQNKLKPEMDEKGNLTTAGFACSQCGQPLFVYKLEQVSEKGKAYTNYFGRCNVAEHEKLILLAQLKPEKDSDEAVTYSLGKFGQRALDFYSIHVTKESTHPVKPLAQIAGNRYASYPVGKALSDACMGTIASFLSKYQDIIIEHQKVVKGNQKRLESLRELAGKENLEYPSVTLPPQPHTKEGVDAYNEVIARVRMWVNLNLWQKLKLSRDDAKPLLRLKGFPSFPLVERQANEVDWWDMVCNVKKLINEKKEDGKVFWQNLAGYKRQEALRPYLSSEEDRKKGKKFARYQLGDLLLHLEKKHGEDWGKVYDEAWERIDKKVEGLSKHIKLEEERRSEDAQSKAALTDWLRAKASFVIEGLKEADKDEFCRCELKLQKWYGDLRGKPFAIEAENSILDISGFSKQYNCAFIWQKDGVKKLNLYLIINYFKGGKLRFKKIKPEAFEANRFYTVINKKSGEIVPMEVNFNFDDPNLIILPLAFGKRQGREFIWNDLLSLETGSLKLANGRVIEKTLYNRRTRQDEPALFVALTFERREVLDSSNIKPMNLIGVDRGENIPAVIALTDPEGCPLSRFKDSLGNPTHILRIGESYKEKQRTIQAKKEVEQRRAGGYSRKYASKAKNLADDMVRNTARDLLYYAVTQDAMLIFENLSRGFGRQGKRTFMAERQYTRMEDWLTAKLAYEGLPSKTYLSKTLAQYTSKTCSNCGFTITSADYDRVLEKLKKTATGWMTTINGKELKVEGQITYYNRYKRQNVVKDLSVELDRLSEESVNNDISSWTKGRSGEALSLLKKRFSHRPVQEKFVCLNCGFETHADEQAALNIARSWLFLRSQEYKKYQTNKTTGNTDKRAFVETWQSFYRKKLKEVWKPAV

SEQ ID NO: 49694 - protein, 978 aa, synthetic construct
QEIKRINKIRRRLVKDSNTKKAGKTGPMKTLLVRVMTPDLRERLENLRKKPENIPQPISNTSRANLNKLLTDYTEMKKAILHVYWEEFQKDPVGLMSRVAQPASKKIDQNKLKPEMDEKGNLTTAGFACSQCGQPLFVYKLEQVSEKGKAYTNYFGRCNVAEHEKLILLAQLKPEKDSDEAVTYSLGKFGQRALDFYSIHVTKESTHPVKPLAQIAGNRYASHPVGKALSDACMGTIASFLSKYQDIIIEHQKVVKGNQKRLESLRELAGKENLEYPSVTLPPQPHTKEGVDAYNEVIARVRMWVNLNLWQKLKLSRDDAKPLLRLKGFPSFPLVERQANEVDWWDMVCNVKKLINEKKEDGKVFWQNLAGYKRQEALRPYLSSEEDRKKGKKFARYQLGDLLLHLEKKHGEDWGKVYDEAWERIDKKVEGLSKHIKLEEERRSEDAQSKAALTDWLRAKASFVIEGLKEADKDEFCRCELKLQKWYGDLRGKPFAIEAENSILDISGFSKQYNCAFIWQKDGVKKLNLYLIINYFKGGKLRFKKIKPEAFEANRFYTVINKKSGEIVPMEVNFNFDDPNLIILPLAFGKRQGREFIWNDLLSLETGSLKLANGRVIEKTLYNRRTRQDEPALFVALTFERREVLDSSNIKPMNLIGVDRGENIPAVIALTDPEGCPLSRFKDSLGNPTHILRIGESYKEKQRTIQAKKEVEQRRAGGYSRKYASKAKNLADDMVRNTARDLLYYAVTQDAMLIFENLSRGFGRQGKRTFMAERQYTRMEDWLTAKLAYEGLPSKTYLSKTLAQYTSKTCSNCGFTITSADYDRVLEKLKKTATGWMTTINGKELKVEGQITYYNRYKRQNVVKDLSVELDRLSEESVNNDISSWTKGRSGEALSLLKKRFSHRPVQEKFVCLNCGFETHADEQAALNIARSWLFLRSQEYKKYQTNKTTGNTDKRAFVETWQSFYRKKLKEVWKPAV

SEQ ID NO: 49695 - protein, 978 aa, synthetic construct
QEIKRINKIRRRLVKDSNTKKAGKTGPMKTLLVRVMTPDLRERLENLRKKPENIPQPISNTSRANLNKLLTDYTEMKKAILHVYWEEFQKDPVGLMSRVAQPASKKIDQNKLKPEMDEKGNLTTAGFACSQCGQPLFVYKLEQVSEKGKAYTNYFGRCNVAEHEKLILLAQLKPEKDSDEAVTYSLGKFGQRALDFYSIHVTKESTHPVKPLAQIAGNRYASTPVGKALSDACMGTIASFLSKYQDIIIEHQKVVKGNQKRLESLRELAGKENLEYPSVTLPPQPHTKEGVDAYNEVIARVRMWVNLNLWQKLKLSRDDAKPLLRLKGFPSFPLVERQANEVDWWDMVCNVKKLINEKKEDGKVFWQNLAGYKRQEALRPYLSSEEDRKKGKKFARYQLGDLLLHLEKKHGEDWGKVYDEAWERIDKKVEGLSKHIKLEEERRSEDAQSKAALTDWLRAKASFVIEGLKEADKDEFCRCELKLQKWYGDLRGKPFAIEAENSILDISGFSKQYNCAFIWQKDGVKKLNLYLIINYFKGGKLRFKKIKPEAFEANRFYTVINKKSGEIVPMEVNFNFDDPNLIILPLAFGKRQGREFIWNDLLSLETGSLKLANGRVIEKTLYNRRTRQDEPALFVALTFERREVLDSSNIKPMNLIGVDRGENIPAVIALTDPEGCPLSRFKDSLGNPTHILRIGESYKEKQRTIQAKKEVEQRRAGGYSRKYASKAKNLADDMVRNTARDLLYYAVTQDAMLIFENLSRGFGRQGKRTFMAERQYTRMEDWLTAKLAYEGLPSKTYLSKTLAQYTSKTCSNCGFTITSADYDRVLEKLKKTATGWMTTINGKELKVEGQITYYNRYKRQNVVKDLSVELDRLSEESVNNDISSWTKGRSGEALSLLKKRFSHRPVQEKFVCLNCGFETHADEQAALNIARSWLFLRSQEYKKYQTNKTTGNTDKRAFVETWQSFYRKKLKEVWKPAV

SEQ ID NO: 49696 - protein, 978 aa, synthetic construct
QEIKRINKIRRRLVKDSNTKKAGKTGPMKTLLVRVMTPDLRERLENLRKKPENIPQPISNTSRANLNKLLTDYTEMKKAILHVYWEEFQKDPVGLMSRVAQPASKKIDQNKLKPEMDEKGNLTTAGFACSQCGQPLFVYKLEQVSEKGKAYTNYFGRCNVAEHEKLILLAQLKPEKDSDEAVTYSLGKFGQRALDFYSIHVTKESTHPVKPLAQIAGNRYASAPVGKALSDACMGTIASFLSKYQDIIIEHQKVVKGNQKRLESLRELAGKENLEYPSVTLPPQPHTKEGVDAYNEVIARVRMWVNLNLWQKLKLSRDDAKPLLRLKGFPSFPLVERQANEVDWWDMVCNVKKLINEKKEDGKVFWQNLAGYKRQEALRPYLSSEEDRKKGKKFARYQLGDLLLHLEKKHGEDWGKVYDEAWERIDKKVEGLSKHIKLEEERRSEDAQSKAALTDWLRAKASFVIEGLKEADKDEFCRCELKLQKWYGDLRGKPFAIEAENSILDISGFSKQYNCAFIWQKDGVKKLNLYLIINYFKGGKLRFKKIKPEAFEANRFYTVINKKSGEIVPMEVNFNFDDPNLIILPLAFGKRQGREFIWNDLLSLETGSLKLANGRVIEKTLYNRRTRQDEPALFVALTFERREVLDSSNIKPMNLIGVDRGENIPAVIALTDPEGCPLSRFKDSLGNPTHILRIGESYKEKQRTIQAKKEVEQRRAGGYSRKYASKAKNLADDMVRNTARDLLYYAVTQDAMLIFENLSRGFGRQGKRTFMAERQYTRMEDWLTAKLAYEGLPSKTYLSKTLAQYTSKTCSNCGFTITSADYDRVLEKLKKTATGWMTTINGKELKVEGQITYYNRYKRQNVVKDLSVELDRLSEESVNNDISSWTKGRSGEALSLLKKRFSHRPVQEKFVCLNCGFETHADEQAALNIARSWLFLRSQEYKKYQTNKTTGNTDKRAFVETWQSFYRKKLKEVWKPAV

SEQ ID NO: 49697 - protein, 978 aa, synthetic construct
QEIKRINKIRRRLVKDSNTKKAGKTGPMKTLLVRVMTPDLRERLENLRKKPENIPQPISNTSRANLNKLLTDYTEMKKAILHVYWEEFQKDPVGLMSRVAQPASKKIDQNKLKPEMDEKGNLTTAGFACSQCGQPLFVYKLEQVSEKGKAYTNYFGRCNVAEHEKLILLAQLKPEKDSDEAVTYSLGKFGQRALDFYSIHVTKESTHPVKPLAQIAGNRYASVPVGKALSDACMGTIASFLSKYQDIIIEHQKVVKGNQKRLESLRELAGKENLEYPSVTLPPQPHTKEGVDAYNEVIARVRMWVNLNLWQKLKLSRDDAKPLLRLKGFPSFPLVERQANEVDWWDMVCNVKKLINEKKEDGKVFWQNLAGYKRQEALRPYLSSEEDRKKGKKFARYQLGDLLLHLEKKHGEDWGKVYDEAWERIDKKVEGLSKHIKLEEERRSEDAQSKAALTDWLRAKASFVIEGLKEADKDEFCRCELKLQKWYGDLRGKPFAIEAENSILDISGFSKQYNCAFIWQKDGVKKLNLYLIINYFKGGKLRFKKIKPEAFEANRFYTVINKKSGEIVPMEVNFNFDDPNLIILPLAFGKRQGREFIWNDLLSLETGSLKLANGRVIEKTLYNRRTRQDEPALFVALTFERREVLDSSNIKPMNLIGVDRGENIPAVIALTDPEGCPLSRFKDSLGNPTHILRIGESYKEKQRTIQAKKEVEQRRAGGYSRKYASKAKNLADDMVRNTARDLLYYAVTQDAMLIFENLSRGFGRQGKRTFMAERQYTRMEDWLTAKLAYEGLPSKTYLSKTLAQYTSKTCSNCGFTITSADYDRVLEKLKKTATGWMTTINGKELKVEGQITYYNRYKRQNVVKDLSVELDRLSEESVNNDISSWTKGRSGEALSLLKKRFSHRPVQEKFVCLNCGFETHADEQAALNIARSWLFLRSQEYKKYQTNKTTGNTDKRAFVETWQSFYRKKLKEVWKPAV

SEQ ID NO: 49698 - protein, 978 aa, synthetic construct
QEIKRINKIRRRLVKDSNTKKAGKTGPMKTLLVRVMTPDLRERLENLRKKPENIPQPISNTSRANLNKLLTDYTEMKKAILHVYWEEFQKDPVGLMSRVAQPASKKIDQNKLKPEMDEKGNLTTAGFACSQCGQPLFVYKLEQVSEKGKAYTNYFGRCNVAEHEKLILLAQLKPEKDSDEAVTYSLGKFGQRALDFYSIHVTKESTHPVKPLAQIAGNRYASGPVGKALRDACMGTIASFLSKYQDIIIEHQKVVKGNQKRLESLRELAGKENLEYPSVTLPPQPHTKEGVDAYNEVIARVRMWVNLNLWQKLKLSRDDAKPLLRLKGFPSFPLVERQANEVDWWDMVCNVKKLINEKKEDGKVFWQNLAGYKRQEALRPYLSSEEDRKKGKKFARYQLGDLLLHLEKKHGEDWGKVYDEAWERIDKKVEGLSKHIKLEEERRSEDAQSKAALTDWLRAKASFVIEGLKEADKDEFCRCELKLQKWYGDLRGKPFAIEAENSILDISGFSKQYNCAFIWQKDGVKKLNLYLIINYFKGGKLRFKKIKPEAFEANRFYTVINKKSGEIVPMEVNFNFDDPNLIILPLAFGKRQGREFIWNDLLSLETGSLKLANGRVIEKTLYNRRTRQDEPALFVALTFERREVLDSSNIKPMNLIGVDRGENIPAVIALTDPEGCPLSRFKDSLGNPTHILRIGESYKEKQRTIQAKKEVEQRRAGGYSRKYASKAKNLADDMVRNTARDLLYYAVTQDAMLIFENLSRGFGRQGKRTFMAERQYTRMEDWLTAKLAYEGLPSKTYLSKTLAQYTSKTCSNCGFTITSADYDRVLEKLKKTATGWMTTINGKELKVEGQITYYNRYKRQNVVKDLSVELDRLSEESVNNDISSWTKGRSGEALSLLKKRFSHRPVQEKFVCLNCGFETHADEQAALNIARSWLFLRSQEYKKYQTNKTTGNTDKRAFVETWQSFYRKKLKEVWKPAV

SEQ ID NO: 49699 - protein, 979 aa, synthetic construct
MQEIKRINKIRRRLVKDSNTKKAGKTGPMKTLLVRVMTPDLRERLENLRKKPENIPQPISNTSRANLNKLLTDYTEMKKAILHVYWEEFQKDPVGLMSRVAQPASKKIDQNKLKPEMDEKGNLTTAGFACSQCGQPLFVYKLEQVSEKGKAYTNYFGRCNVAEHEKLILLAQLKPEKDSDEAVTYSLGKFGQRALDFYSIHVTKESTHPVKPLAQIAGNRYASGPVGKALSDACMGTIASFLSKYQDIIIEHQKVVKGNQKRLESLRELAGKENLEYPSVTLPPQPHTKEGVDAYNEVIARVRMWVNLNLWQKLKLSRDDAKPLLRLKGFPSFPLVERQANEVDWWDMVCNVKKLINEKKEDGKVFWQNLAGYKRQEALRPYLSSEEDRKKGKKFARYQLGDLLLHLEKKHGEDWGKVYDEAWERIDKKVEGLSKHIKLEEERRSEDAQSKAALTDWLRAKASFVIEGLKEADKDEFCRCELKLQKWYGDLRGKPFAIEAENSILDISGFSKQYNCAFIWQKDGVKKLNLYLIINYFKGGKLRFKKIKPEAFEANRFYTVINKKSGEIVPMEVNFNFDDPNLIILPLAFGKRQGREFIWNDLLSLETGSLKLANGRVIEKTLYNRRTRQDEPALFVALTFERREVLDSSNIKPMNLIGVDRGENIPAVIALTDPEGCPLSRFKDSLGNPTHILRIGESYKEKQRTIQAKKEVEQRRAGGYSRKYASKAKNLADDMVRNTARDLLYYAVTQDAMLIFENLSRGFGRQGKRTFMAERQYTRMEDWLTAKLAYEGLPSKTYLSKTLAQYTSKTCSNCGFTITSADYDRVLEKLKKTATGWMTTINGKELKVEGQITYYNRYKRQNVVKDLSVELDRLSEESVNNDISSWTKGRSGEALSLLKKRFSHRPVQEKFVCLNCGFETHADEQAALNIARSWLFLRSQEYKKYQTNKTTGNTDKRAFVETWQSFYRKKLKEVWKPAV

SEQ ID NO: 49700 - DNA, 89 bp, synthetic construct
  source 1..89: mol_type = other DNA
actggcgcttttatctgattactttgagagccatcaccagcgactatgtcgtagtgggtaaagctccctcttcggagggagcatcaaag

SEQ ID NO: 49701 - DNA, 99 bp, synthetic construct
  source 1..99: mol_type = other DNA
actggcgcttctatctgattactctgagcgccatcaccagcgactatgtcgtagtgggtaaagccgcttacggacttcggtccgtaagaggcatcagag

SEQ ID NO: 49702 - DNA, 90 bp, synthetic construct
  source 1..90: mol_type = other DNA
actggctgcttctatctgattactctgagcgccatcaccagcgactatgtcgtagtgggtaaagctccctcttcggagggagcatcagag

SEQ ID NO: 49703 - DNA, 90 bp, synthetic construct
  source 1..90: mol_type = other DNA
actggcggcttctatctgattactctgagcgccatcaccagcgactatgtcgtagtgggtaaagctccctcttcggagggagcatcagag

SEQ ID NO: 49704 - DNA, 90 bp, synthetic construct
  source 1..90: mol_type = other DNA
actggcggcttctatctgattactctgtgcgccatcaccagcgactatgtcgtagtgggtaaagctccctcttcggagggagcatcagag

SEQ ID NO: 49705 - DNA, 91 bp, synthetic construct
  source 1..91: mol_type = other DNA
actggcggcttctatctgattactctgaggcgccatcaccagcgactatgtcgtagtgggtaaagctccctcttcggagggagcatcagag

SEQ ID NO: 49706 - DNA, 91 bp, synthetic construct
  source 1..91: mol_type = other DNA
actggctgcttctatctgattactctgagccgccatcaccagcgactatgtcgtagtgggtaaagctccctcttcggagggagcatcagag

SEQ ID NO: 49707 - DNA, 91 bp, synthetic construct
  source 1..91: mol_type = other DNA
actggccgcttctatctgattactctgaggcgccatcaccagcgactatgtcgtagtgggtaaagctccctcttcggagggagcatcagag

SEQ ID NO: 49708 - DNA, 90 bp, synthetic construct
  source 1..90: mol_type = other DNA
actggcgcttctatctgattactctgagccgccatcaccagcgactatgtcgtagtgggtaaagctccctcttcggagggagcatcagag

SEQ ID NO: 49709 - DNA, 90 bp, synthetic construct
  source 1..90: mol_type = other DNA
actggcgcttctatctgattactctgagtcgccatcaccagcgactatgtcgtagtgggtaaagctccctcttcggagggagcatcagag

SEQ ID NO: 49710 - DNA, 91 bp, synthetic construct
  source 1..91: mol_type = other DNA
actggcgggttctatctgattactctgagccgccatcaccagcgactatgtcgtagtgggtaaagctccctcttcggagggagcatcagag

SEQ ID NO: 49711 - DNA, 90 bp, synthetic construct
  source 1..90: mol_type = other DNA
actggccgcttctatctgattactctgagcgccatcaccagcgactatgtcgtagtgggtaaagctccctcttcggagggagcatcagag

SEQ ID NO: 49712 - DNA, 90 bp, synthetic construct
  source 1..90: mol_type = other DNA
actggtggcttctatctgattactctgagcgccatcaccagcgactatgtcgtagtgggtaaagctccctcttcggagggagcatcagag

SEQ ID NO: 49713 - DNA, 90 bp, synthetic construct
  source 1..90: mol_type = other DNA
actggcgggttctatctgattactctgagcgccatcaccagcgactatgtcgtagtgggtaaagctccctcttcggagggagcatcagag

SEQ ID NO: 49714 - DNA, 91 bp, synthetic construct
  source 1..91: mol_type = other DNA
actggcggcttctatctgattactctgggccgccatcaccagcgactatgtcgtagtgggtaaagctccctcttcggagggagcatcagag

SEQ ID NO: 49715 - DNA, 95 bp, synthetic construct
  source 1..95: mol_type = other DNA
acctgtaggcttctatctgattactctgctacagcgccatcaccagcgactatgtcgtagtgggtaaagctccctcttcggagggagcatcagag

SEQ ID NO: 49716 - DNA, 95 bp, synthetic construct
  source 1..95: mol_type = other DNA
accagcaagcttctatctgattactctgttgctgcgccatcaccagcgactatgtcgtagtgggtaaagctccctcttcggagggagcatcagag

SEQ ID NO: 49717 - DNA, 95 bp, synthetic construct
  source 1..95: mol_type = other DNA
accgagacgcttctatctgattactctgggctcgcgccatcaccagcgactatgtcgtagtgggtaaagctccctcttcggagggagcatcagag

SEQ ID NO: 49718 - DNA, 99 bp, synthetic construct
  source 1..99: mol_type = other DNA
actgggccttctatctgattactctgaggcccatcaccagcgactatgtcgtagtgggtaaagccgcttacggacttcggtccgtaagaggcatcagag

SEQ ID NO: 49719 - RNA, 90 nt, synthetic construct
  source 1..90: mol_type = other RNA
actggctgcttctatctgattactctgagcgccatcaccagcgactatgtcgtagtgggtaaagctccctcttcggagggagcatcagag

SEQ ID NO: 49720 - RNA, 90 nt, synthetic construct
  source 1..90: mol_type = other RNA
actggcggcttctatctgattactctgagcgccatcaccagcgactatgtcgtagtgggtaaagctccctcttcggagggagcatcagag

SEQ ID NO: 49721 - RNA, 90 nt, synthetic construct
  source 1..90: mol_type = other RNA
actggcggcttctatctgattactctgtgcgccatcaccagcgactatgtcgtagtgggtaaagctccctcttcggagggagcatcagag

SEQ ID NO: 49722 - RNA, 91 nt, synthetic construct
  source 1..91: mol_type = other RNA
actggcggcttctatctgattactctgaggcgccatcaccagcgactatgtcgtagtgggtaaagctccctcttcggagggagcatcagag

SEQ ID NO: 49723 - RNA, 91 nt, synthetic construct
  source 1..91: mol_type = other RNA
actggctgcttctatctgattactctgagccgccatcaccagcgactatgtcgtagtgggtaaagctccctcttcggagggagcatcagag

SEQ ID NO: 49724 - RNA, 91 nt, synthetic construct
  source 1..91: mol_type = other RNA
actggccgcttctatctgattactctgaggcgccatcaccagcgactatgtcgtagtgggtaaagctccctcttcggagggagcatcagag

SEQ ID NO: 49725 - RNA, 90 nt, synthetic construct
  source 1..90: mol_type = other RNA
actggcgcttctatctgattactctgagccgccatcaccagcgactatgtcgtagtgggtaaagctccctcttcggagggagcatcagag

SEQ ID NO: 49726 - RNA, 90 nt, synthetic construct
  source 1..90: mol_type = other RNA
actggcgcttctatctgattactctgagtcgccatcaccagcgactatgtcgtagtgggtaaagctccctcttcggagggagcatcagag

SEQ ID NO: 49727 - RNA, 91 nt, synthetic construct
  source 1..91: mol_type = other RNA
actggcgggttctatctgattactctgagccgccatcaccagcgactatgtcgtagtgggtaaagctccctcttcggagggagcatcagag

SEQ ID NO: 49728 - RNA, 90 nt, synthetic construct
  source 1..90: mol_type = other RNA
actggccgcttctatctgattactctgagcgccatcaccagcgactatgtcgtagtgggtaaagctccctcttcggagggagcatcagag

SEQ ID NO: 49729 - RNA, 90 nt, synthetic construct
  source 1..90: mol_type = other RNA
actggtggcttctatctgattactctgagcgccatcaccagcgactatgtcgtagtgggtaaagctccctcttcggagggagcatcagag

SEQ ID NO: 49730 - RNA, 90 nt, synthetic construct
  source 1..90: mol_type = other RNA
actggcgggttctatctgattactctgagcgccatcaccagcgactatgtcgtagtgggtaaagctccctcttcggagggagcatcagag

SEQ ID NO: 49731 - RNA, 91 nt, synthetic construct
  source 1..91: mol_type = other RNA
actggcggcttctatctgattactctgggccgccatcaccagcgactatgtcgtagtgggtaaagctccctcttcggagggagcatcagag

SEQ ID NO: 49732 - RNA, 95 nt, synthetic construct
  source 1..95: mol_type = other RNA
acctgtaggcttctatctgattactctgctacagcgccatcaccagcgactatgtcgtagtgggtaaagctccctcttcggagggagcatcagag

SEQ ID NO: 49733 - RNA, 95 nt, synthetic construct
  source 1..95: mol_type = other RNA
accagcaagcttctatctgattactctgttgctgcgccatcaccagcgactatgtcgtagtgggtaaagctccctcttcggagggagcatcagag

SEQ ID NO: 49734 - RNA, 95 nt, synthetic construct
  source 1..95: mol_type = other RNA
accgagacgcttctatctgattactctgggctcgcgccatcaccagcgactatgtcgtagtgggtaaagctccctcttcggagggagcatcagag

SEQ ID NO: 49735 - RNA, 99 nt, synthetic construct
  source 1..99: mol_type = other RNA
actgggccttctatctgattactctgaggcccatcaccagcgactatgtcgtagtgggtaaagccgcttacggacttcggtccgtaagaggcatcagag

SEQ ID NO: 49736 - RNA, 17 nt, synthetic construct
  source 1..17: mol_type = other RNA
tctatctgattactctg

SEQ ID NO: 49737 - RNA, 21 nt, synthetic construct
  source 1..21: mol_type = other RNA
ccagcgactatgtcgtagtgg

SEQ ID NO: 49738 - RNA, 30 nt, synthetic construct
  source 1..30: mol_type = other RNA
gccgcttacggacttcggtccgtaagaggc

SEQ ID NO: 49739 - RNA, 20 nt, synthetic construct
  source 1..20: mol_type = other RNA
gctccctcttcggagggagc

SEQ ID NO: 49740 - DNA, 20 bp, synthetic construct
  source 1..20: mol_type = other DNA
gtgtagtacaagagatagaa

SEQ ID NO: 49741 - DNA, 20 bp, synthetic construct
  source 1..20: mol_type = other DNA
cccccactgaaaaagatgag

SEQ ID NO: 49742 - DNA, 20 bp, synthetic construct
  source 1..20: mol_type = other DNA
aggccagaaagagagagtag

SEQ ID NO: 49743 - DNA, 20 bp, synthetic construct
  source 1..20: mol_type = other DNA
cgctggatagcctccaggcc

SEQ ID NO: 49744 - DNA, 20 bp, synthetic construct
  source 1..20: mol_type = other DNA
tgaagctgacagcattcggg

SEQ ID NO: 49745 - DNA, 20 bp, synthetic construct
  source 1..20: mol_type = other DNA
cgagacgtaattacgtctcg

SEQ ID NO: 49746 - protein, 982 aa, synthetic construct
QEIGKRINKIRRRLVKDSNTKKAGKTRKTGPMKTLLVRVMTPDLRERLENLRKKPENIPQPISNTSRANLNKLLTDYTEMKKAILHVYWEEFQKDPVGLMSRVAQPASKKIDQNKLKPEMDEKGNLTTAGFACSQCGQPLFVYKLEQVSEKGKAYTNYFGRCNVAEHEKLILLAQLKPEKDSDEAVTYSLGKFGQRALDFYSIHVTKESTHPVKPLAQIAGNRYASGPVGKALSDACMGTIASFLSKYQDIIIEHQKVVKGNQKRLESLRELAGKENLEYPSVTLPPQPHTKEGVDAYNEVIARVRMWVNLNLWQKLKLSRDDAKPLLRLKGFPSFPLVERQANEVDWWDMVCNVKKLINEKKEDGKVFWQNLAGYKRQEALRPYLSSEEDRKKGKKFARYQLGDLLLHLEKKHGEDWGKVYDEAWERIDKKVEGLSKHIKLEEERRSEDAQSKAALTDWLRAKASFVIEGLKEADKDEFCRCELKLQKWYGDLRGKPFAIEAENSILDISGFSKQYNCAFIWQKDGVKKLNLYLIINYFKGGKLRFKKIKPEAFEANRFYTVINKKSGEIVPMEVNFNFDDPNLIILPLAFGKRQGREFIWNDLLSLETGSLKLANGRVIEKTLYNRRTRQDEPALFVALTFERREVLDSSNIKPMNLIGVDRGENIPAVIALTDPEGCPLSRFKDSLGNPTHILRIGESYKEKQRTIQAKKEVEQRRAGGYSRKYASKAKNLADDMVRNTARDLLYYAVTQDAMLIFENLSRGFGRQGKRTFMAERQYTRMEDWLTAKLAYEGLPSKTYLSKTLAQYTSKTCSNCGFTITSADYDRVLEKLKKTATGWMTTINGKELKVEGQITYYNRYKRQNVVKDLSVELDRLSEESVNNDISSWTKGRSGEALSLLKKRFSHRPVQEKFVCLNCGFETHADEQAALNIARSWLFLRSQEYKKYQTNKTTGNTDKRAFVETWQSFYRKKLKEVWKPAV

SEQ ID NO: 49747 - protein, 982 aa, synthetic construct
QEIKGRINKIRRRLVKDSNTKKAGKTRKTGPMKTLLVRVMTPDLRERLENLRKKPENIPQPISNTSRANLNKLLTDYTEMKKAILHVYWEEFQKDPVGLMSRVAQPASKKIDQNKLKPEMDEKGNLTTAGFACSQCGQPLFVYKLEQVSEKGKAYTNYFGRCNVAEHEKLILLAQLKPEKDSDEAVTYSLGKFGQRALDFYSIHVTKESTHPVKPLAQIAGNRYASGPVGKALSDACMGTIASFLSKYQDIIIEHQKVVKGNQKRLESLRELAGKENLEYPSVTLPPQPHTKEGVDAYNEVIARVRMWVNLNLWQKLKLSRDDAKPLLRLKGFPSFPLVERQANEVDWWDMVCNVKKLINEKKEDGKVFWQNLAGYKRQEALRPYLSSEEDRKKGKKFARYQLGDLLLHLEKKHGEDWGKVYDEAWERIDKKVEGLSKHIKLEEERRSEDAQSKAALTDWLRAKASFVIEGLKEADKDEFCRCELKLQKWYGDLRGKPFAIEAENSILDISGFSKQYNCAFIWQKDGVKKLNLYLIINYFKGGKLRFKKIKPEAFEANRFYTVINKKSGEIVPMEVNFNFDDPNLIILPLAFGKRQGREFIWNDLLSLETGSLKLANGRVIEKTLYNRRTRQDEPALFVALTFERREVLDSSNIKPMNLIGVDRGENIPAVIALTDPEGCPLSRFKDSLGNPTHILRIGESYKEKQRTIQAKKEVEQRRAGGYSRKYASKAKNLADDMVRNTARDLLYYAVTQDAMLIFENLSRGFGRQGKRTFMAERQYTRMEDWLTAKLAYEGLPSKTYLSKTLAQYTSKTCSNCGFTITSADYDRVLEKLKKTATGWMTTINGKELKVEGQITYYNRYKRQNVVKDLSVELDRLSEESVNNDISSWTKGRSGEALSLLKKRFSHRPVQEKFVCLNCGFETHADEQAALNIARSWLFLRSQEYKKYQTNKTTGNTDKRAFVETWQSFYRKKLKEVWKPAV

SEQ ID NO: 49748 - RNA, 109 nt, synthetic construct
  source 1..109: mol_type = other RNA
actggcgcttttatctgattactttgagagccatcaccagcgactatgtcgtagtgggtaaagctccctcttcggagggagcatcaaagnnnnnnnnnnnnnnnnnnnn

SEQ ID NO: 49749 - RNA, 109 nt, synthetic construct; identical to SEQ ID NO: 49748
  misc_feature 1..4: note = linked via phosphorothioate
  modified_base 1: mod_base = OTHER; note = 2'-O-methyl-adenosine
  modified_base 2: mod_base = cm
  modified_base 3: mod_base = um
  misc_feature 107..109: note = linked via phosphorothioate
  modified_base 107: mod_base = OTHER; note = any 2'-O-methyl ribonucleotide
  modified_base 108: mod_base = OTHER; note = any 2'-O-methyl ribonucleotide
  modified_base 109: mod_base = OTHER; note = any 2'-O-methyl ribonucleotide
  source 1..109: mol_type = other RNA

SEQ ID NO: 49750 - RNA, 112 nt, synthetic construct
  misc_feature 1..4: note = linked via phosphorothioate
  modified_base 1: mod_base = OTHER; note = 2'-O-methyl-adenosine
  modified_base 2: mod_base = cm
  modified_base 3: mod_base = um
  misc_feature 109..112: note = linked via phosphorothioate
  modified_base 110: mod_base = um
  modified_base 111: mod_base = um
  modified_base 112: mod_base = um
  source 1..112: mol_type = other RNA
actggcgcttttatctgattactttgagagccatcaccagcgactatgtcgtagtgggtaaagctccctcttcggagggagcatcaaagnnnnnnnnnnnnnnnnnnnnttt

SEQ ID NO: 49751 - RNA, 109 nt, synthetic construct; identical to SEQ ID NO: 49748
  misc_feature 1..4: note = linked via phosphorothioate
  modified_base 1: mod_base = OTHER; note = 2'-O-methyl-adenosine
  modified_base 2: mod_base = cm
  modified_base 3: mod_base = um
  modified_base 4: mod_base = gm
  modified_base 5: mod_base = gm
  modified_base 6: mod_base = cm
  modified_base 7: mod_base = gm
  modified_base 8: mod_base = cm
  modified_base 9: mod_base = um
  modified_base 10: mod_base = um
  modified_base 11: mod_base = um
  modified_base 12: mod_base = um
  modified_base 13: mod_base = OTHER; note = 2'-O-methyl-adenosine
  modified_base 14: mod_base = um
  modified_base 15: mod_base = cm
  modified_base 16: mod_base = um
  modified_base 17: mod_base = gm
  modified_base 18: mod_base = OTHER; note = 2'-O-methyl-adenosine
  modified_base 19: mod_base = um
  modified_base 27: mod_base = OTHER; note = 2'-O-methyl-adenosine
  modified_base 28: mod_base = gm
  modified_base 29: mod_base = OTHER; note = 2'-O-methyl-adenosine
  modified_base 30: mod_base = gm
  modified_base 31: mod_base = cm
  modified_base 32: mod_base = cm
  modified_base 33: mod_base = OTHER; note = 2'-O-methyl-adenosine
  modified_base 34: mod_base = um
  modified_base 35: mod_base = cm
  modified_base 36: mod_base = OTHER; note = 2'-O-methyl-adenosine
  modified_base 37: mod_base = cm
  modified_base 38: mod_base = cm
  modified_base 44: mod_base = cm
  modified_base 45: mod_base = um
  modified_base 48: mod_base = gm
  modified_base 49: mod_base = um
  modified_base 50: mod_base = cm
  modified_base 51: mod_base = gm
  modified_base 57: mod_base = gm
  modified_base 58: mod_base = gm
  modified_base 59: mod_base = um
  modified_base 60: mod_base = OTHER; note = 2'-O-methyl-adenosine
  modified_base 61: mod_base = OTHER; note = 2'-O-methyl-adenosine
  modified_base 62: mod_base = OTHER; note = 2'-O-methyl-adenosine
  modified_base 63: mod_base = gm
  modified_base 64: mod_base = cm
  modified_base 65: mod_base = um
  modified_base 66: mod_base = cm
  modified_base 67: mod_base = cm
  modified_base 68: mod_base = cm
  modified_base 69: mod_base = um
  modified_base 70: mod_base = cm
  modified_base 71: mod_base = um
  modified_base 72: mod_base = um
  modified_base 73: mod_base = cm
  modified_base 74: mod_base = gm
  modified_base 75: mod_base = gm
  modified_base 76: mod_base = OTHER; note = 2'-O-methyl-adenosine
  modified_base 77: mod_base = gm
  modified_base 78: mod_base = gm
  modified_base 79: mod_base = gm
  modified_base 80: mod_base = OTHER; note = 2'-O-methyl-adenosine
  modified_base 81: mod_base = gm
  modified_base 82: mod_base = cm
  modified_base 83: mod_base = OTHER; note = 2'-O-methyl-adenosine
  modified_base 84: mod_base = um
  modified_base 85: mod_base = cm
  modified_base 86: mod_base = OTHER; note = 2'-O-methyl-adenosine
  misc_feature 107..109: note = linked via phosphorothioate
  modified_base 107: mod_base = OTHER; note = any 2'-O-methyl ribonucleotide
  modified_base 108: mod_base = OTHER; note = any 2'-O-methyl ribonucleotide
  modified_base 109: mod_base = OTHER; note = any 2'-O-methyl ribonucleotide
  source 1..109: mol_type = other RNA

SEQ ID NO: 49752 - RNA, 109 nt, synthetic construct; identical to SEQ ID NO: 49748
  misc_feature 1..4: note = linked via phosphorothioate
  modified_base 1: mod_base = OTHER; note = 2'-O-methyl-adenosine
  modified_base 2: mod_base = cm
  modified_base 3: mod_base = um
  modified_base 4: mod_base = gm
  modified_base 5: mod_base = gm
  modified_base 6: mod_base = cm
  modified_base 7: mod_base = gm
  modified_base 8: mod_base = cm
  modified_base 13: mod_base = OTHER; note = 2'-O-methyl-adenosine
  modified_base 14: mod_base = um
  modified_base 15: mod_base = cm
  modified_base 16: mod_base = um
  modified_base 17: mod_base = gm
  modified_base 18: mod_base = OTHER; note = 2'-O-methyl-adenosine
  modified_base 19: mod_base = um
  modified_base 27: mod_base = OTHER; note = 2'-O-methyl-adenosine
  modified_base 28: mod_base = gm
  modified_base 29: mod_base = OTHER; note = 2'-O-methyl-adenosine
  modified_base 30: mod_base = gm
  modified_base 31: mod_base = cm
  modified_base 32: mod_base = cm
  modified_base 33: mod_base = OTHER; note = 2'-O-methyl-adenosine
  modified_base 34: mod_base = um
  modified_base 35: mod_base = cm
  modified_base 36: mod_base = OTHER; note = 2'-O-methyl-adenosine
  modified_base 37: mod_base = cm
  modified_base 38: mod_base = cm
  modified_base 44: mod_base = cm
  modified_base 45: mod_base = um
  modified_base 48: mod_base = gm
  modified_base 49: mod_base = um
  modified_base 50: mod_base = cm
  modified_base 51: mod_base = gm
  modified_base 57: mod_base = gm
  modified_base 58: mod_base = gm
  modified_base 59: mod_base = um
  modified_base 60: mod_base = OTHER; note = 2'-O-methyl-adenosine
  modified_base 61: mod_base = OTHER; note = 2'-O-methyl-adenosine
  modified_base 62: mod_base = OTHER; note = 2'-O-methyl-adenosine
  modified_base 63: mod_base = gm
  modified_base 64: mod_base = cm
  modified_base 65: mod_base = um
  modified_base 66: mod_base = cm
  modified_base 67: mod_base = cm
  modified_base 68: mod_base = cm
  modified_base 69: mod_base = um
  modified_base 70: mod_base = cm
  modified_base 71: mod_base = um
  modified_base 72: mod_base = um
  modified_base 73: mod_base = cm
  modified_base 74: mod_base = gm
  modified_base 75: mod_base = gm
  modified_base 76: mod_base = OTHER; note = 2'-O-methyl-adenosine
  modified_base 77: mod_base = gm
  modified_base 78: mod_base = gm
  modified_base 79: mod_base = gm
  modified_base 80: mod_base = OTHER; note = 2'-O-methyl-adenosine
  modified_base 81: mod_base = gm
  modified_base 82: mod_base = cm
  modified_base 83: mod_base = OTHER; note = 2'-O-methyl-adenosine
  modified_base 84: mod_base = um
  misc_feature 107..109: note = linked via phosphorothioate
  modified_base 107: mod_base = OTHER; note = any 2'-O-methyl ribonucleotide
  modified_base 108: mod_base = OTHER; note = any 2'-O-methyl ribonucleotide
  modified_base 109: mod_base = OTHER; note = any 2'-O-methyl ribonucleotide
  source 1..109: mol_type = other RNA

SEQ ID NO: 49753 - RNA, 109 nt, synthetic construct; identical to SEQ ID NO: 49748
  misc_feature 1..4: note = linked via phosphorothioate
  modified_base 1: mod_base = OTHER; note = 2'-O-methyl-adenosine
  modified_base 2: mod_base = cm
  modified_base 3: mod_base = um
  modified_base 44: mod_base = cm
  modified_base 45: mod_base = um
  modified_base 48: mod_base = gm
  modified_base 49: mod_base = um
  modified_base 50: mod_base = cm
  modified_base 51: mod_base = gm
  modified_base 63: mod_base = gm
  modified_base 64: mod_base = cm
  modified_base 65: mod_base = um
  modified_base 66: mod_base = cm
  modified_base 67: mod_base = cm
  modified_base 68: mod_base = cm
  modified_base 69: mod_base = um
  modified_base 70: mod_base = cm
  modified_base 71: mod_base = um
  modified_base 72: mod_base = um
  modified_base 73: mod_base = cm
  modified_base 74: mod_base = gm
  modified_base 75: mod_base = gm
  modified_base 76: mod_base = OTHER; note = 2'-O-methyl-adenosine
  modified_base 77: mod_base = gm
  modified_base 78: mod_base = gm
  modified_base 79: mod_base = gm
  modified_base 80: mod_base = OTHER; note = 2'-O-methyl-adenosine
  modified_base 81: mod_base = gm
  modified_base 82: mod_base = cm
  misc_feature 107..109: note = linked via phosphorothioate
  modified_base 107: mod_base = OTHER; note = any 2'-O-methyl ribonucleotide
  modified_base 108: mod_base = OTHER; note = any 2'-O-methyl ribonucleotide
  modified_base 109: mod_base = OTHER; note = any 2'-O-methyl ribonucleotide
  source 1..109: mol_type = other RNA

SEQ ID NO: 49754 - RNA, 109 nt, synthetic construct; identical to SEQ ID NO: 49748
  misc_feature 1..4: note = linked via phosphorothioate
  modified_base 1: mod_base = OTHER; note = 2'-O-methyl-adenosine
  modified_base 2: mod_base = cm
  modified_base 3: mod_base = um
  modified_base 63: mod_base = gm
  modified_base 64: mod_base = cm
  modified_base 65: mod_base = um
  modified_base 66: mod_base = cm
  modified_base 67: mod_base = cm
  modified_base 68: mod_base = cm
  modified_base 69: mod_base = um
  modified_base 70: mod_base = cm
  modified_base 71: mod_base = um
  modified_base 72: mod_base = um
  modified_base 73: mod_base = cm
  modified_base 74: mod_base = gm
  modified_base 75: mod_base = gm
  modified_base 76: mod_base = OTHER; note = 2'-O-methyl-adenosine
  modified_base 77: mod_base = gm
  modified_base 78: mod_base = gm
  modified_base 79: mod_base = gm
  modified_base 80: mod_base = OTHER; note = 2'-O-methyl-adenosine
  modified_base 81: mod_base = gm
  modified_base 82: mod_base = cm
  misc_feature 107..109: note = linked via phosphorothioate
  modified_base 107: mod_base = OTHER; note = any 2'-O-methyl ribonucleotide
  modified_base 108: mod_base = OTHER; note = any 2'-O-methyl ribonucleotide
  modified_base 109: mod_base = OTHER; note = any 2'-O-methyl ribonucleotide
  source 1..109: mol_type = other RNA

SEQ ID NO: 49755 - RNA, 109 nt, synthetic construct; identical to SEQ ID NO: 49748
  misc_feature 1..4: note = linked via phosphorothioate
  modified_base 1: mod_base = OTHER; note = 2'-O-methyl-adenosine
  modified_base 2: mod_base = cm
  modified_base 3: mod_base = um
  modified_base 6: mod_base = cm
  modified_base 7: mod_base = OTHER; note = G
  modified_base 8: mod_base = cm
  modified_base 9: mod_base = um
  modified_base 14: mod_base = um
  modified_base 15: mod_base = cm
  modified_base 27: mod_base = OTHER; note = 2'-O-methyl-adenosine
  modified_base 28: mod_base = gm
  modified_base 33: mod_base = OTHER; note = 2'-O-methyl-adenosine
  modified_base 34: mod_base = um
  modified_base 35: mod_base = cm
  modified_base 36: mod_base = OTHER; note = 2'-O-methyl-adenosine
  modified_base 37: mod_base = cm
  modified_base 42: mod_base = gm
  modified_base 43: mod_base = OTHER; note = 2'-O-methyl-adenosine
  modified_base 44: mod_base = cm
  modified_base 45: mod_base = um
  modified_base 48: mod_base = gm
  modified_base 49: mod_base = um
  modified_base 50: mod_base = cm
  modified_base 51: mod_base = gm
  modified_base 58: mod_base = gm
  modified_base 59: mod_base = um
  modified_base 61: mod_base = OTHER; note = 2'-O-methyl-adenosine
  modified_base 62: mod_base = OTHER; note = 2'-O-methyl-adenosine
  modified_base 63: mod_base = gm
  modified_base 64: mod_base = cm
  modified_base 65: mod_base = um
  modified_base 66: mod_base = cm
  modified_base 67: mod_base = cm
  modified_base 68: mod_base = cm
  modified_base 69: mod_base = um
  modified_base 70: mod_base = cm
  modified_base 71: mod_base = um
  modified_base 72: mod_base = um
  modified_base 73: mod_base = cm
  modified_base 74: mod_base = gm
  modified_base 75: mod_base = gm
  modified_base 76: mod_base = OTHER; note = 2'-O-methyl-adenosine
  modified_base 77: mod_base = gm
  modified_base 78: mod_base = gm
  modified_base 79: mod_base = gm
  modified_base 80: mod_base = OTHER; note = 2'-O-methyl-adenosine
  modified_base 81: mod_base = gm
  modified_base 82: mod_base = cm
  modified_base 83: mod_base = OTHER; note = 2'-O-methyl-adenosine
  modified_base 84: mod_base = um
  misc_feature 106..109: note = linked via phosphorothioate
  modified_base 107: mod_base = OTHER; note = any 2'-O-methyl ribonucleotide
  modified_base 108: mod_base = OTHER; note = any 2'-O-methyl ribonucleotide
  modified_base 109: mod_base = OTHER; note = any 2'-O-methyl ribonucleotide
  source 1..109: mol_type = other RNA

SEQ ID NO: 49756 - RNA, 109 nt, synthetic construct; identical to SEQ ID NO: 49748
  misc_feature 1..4: note = linked via phosphorothioate
  modified_base 1: mod_base = OTHER; note = 2'-O-methyl-adenosine
  modified_base 2: mod_base = cm
  modified_base 3: mod_base = um
  modified_base 33: mod_base = OTHER; note = 2'-O-methyl-adenosine
  modified_base 34: mod_base = um
  modified_base 35: mod_base = cm
  modified_base 36: mod_base = OTHER; note = 2'-O-methyl-adenosine
  modified_base 37: mod_base = cm
  modified_base 42: mod_base = gm
  modified_base 43: mod_base = OTHER; note = 2'-O-methyl-adenosine
  modified_base 44: mod_base = cm
  modified_base 45: mod_base = um
  modified_base 48: mod_base = gm
  modified_base 49: mod_base = um
  modified_base 50: mod_base = cm
  modified_base 51: mod_base = gm
  modified_base 58: mod_base = gm
  modified_base 59: mod_base = um
  modified_base 60: mod_base = OTHER; note = 2'-O-methyl-adenosine
  modified_base 61: mod_base = OTHER; note = 2'-O-methyl-adenosine
  modified_base 63: mod_base = gm
  modified_base 64: mod_base = cm
  modified_base 65: mod_base = um
  modified_base 66: mod_base = cm
  modified_base 67: mod_base = cm
  modified_base 68: mod_base = cm
  modified_base 69: mod_base = um
  modified_base 70: mod_base = cm
  modified_base 71: mod_base = um
  modified_base 72: mod_base = um
  modified_base 73: mod_base = cm
  modified_base 74: mod_base = gm
  modified_base 75: mod_base = gm
  modified_base 76: mod_base = OTHER; note = 2'-O-methyl-adenosine
  modified_base 77: mod_base = gm
  modified_base 78: mod_base = gm
  modified_base 79: mod_base = gm
  modified_base 80: mod_base = OTHER; note = 2'-O-methyl-adenosine
  modified_base 81: mod_base = gm
  modified_base 82: mod_base = cm
  modified_base 83: mod_base = OTHER; note = 2'-O-methyl-adenosine
  modified_base 84: mod_base = um
  misc_feature 106..109: note = linked via phosphorothioate
  modified_base 107: mod_base = OTHER; note = any 2'-O-methyl ribonucleotide
  modified_base 108: mod_base = OTHER; note = any 2'-O-methyl ribonucleotide
  modified_base 109: mod_base = OTHER; note = any 2'-O-methyl ribonucleotide
  source 1..109: mol_type = other RNA

SEQ ID NO: 49757 - RNA, 109 nt, synthetic construct; identical to SEQ ID NO: 49748
  misc_feature 1..4: note = linked via phosphorothioate
  modified_base 1: mod_base = OTHER; note = 2'-O-methyl-adenosine
  modified_base 2: mod_base = cm
  modified_base 3: mod_base = um
  modified_base 6: mod_base = cm
  modified_base 7: mod_base = gm
  modified_base 9: mod_base = um
  modified_base 14: mod_base = um
  modified_base 15: mod_base = cm
  modified_base 27: mod_base = OTHER; note = 2'-O-methyl-adenosine
  modified_base 28: mod_base = gm
  modified_base 42: mod_base = gm
  modified_base 43: mod_base = OTHER; note = 2'-O-methyl-adenosine
  modified_base 44: mod_base = cm
  modified_base 45: mod_base = um
  modified_base 48: mod_base = gm
  modified_base 49: mod_base = um
  modified_base 50: mod_base = cm
  modified_base 51: mod_base = gm
  modified_base 63: mod_base = gm
  modified_base 64: mod_base = cm
  modified_base 65: mod_base = um
  modified_base 66: mod_base = cm
  modified_base 67: mod_base = cm
  modified_base 68: mod_base = cm
  modified_base 69: mod_base = um
  modified_base 70: mod_base = cm
  modified_base 71: mod_base = um
  modified_base 72: mod_base = um
  modified_base 73: mod_base = cm
  modified_base 74: mod_base = gm
  modified_base 75: mod_base = gm
  modified_base 76: mod_base = OTHER; note = 2'-O-methyl-adenosine
  modified_base 77: mod_base = gm
  modified_base 78: mod_base = gm
  modified_base 79: mod_base = gm
  modified_base 80: mod_base = OTHER; note = 2'-O-methyl-adenosine
  modified_base 81: mod_base = gm
  modified_base 82: mod_base = cm
  misc_feature 106..109: note = linked via phosphorothioate
  modified_base 107: mod_base = OTHER; note = any 2'-O-methyl ribonucleotide
  modified_base 108: mod_base = OTHER; note = any 2'-O-methyl ribonucleotide
  modified_base 109: mod_base = OTHER; note = any 2'-O-methyl ribonucleotide
  source 1..109: mol_type = other RNA

SEQ ID NO: 49758 - RNA, 119 nt, synthetic construct
  source 1..119: mol_type = other RNA
actggcgcttctatctgattactctgagcgccatcaccagcgactatgtcgtagtgggtaaagccgcttacggacttcggtccgtaagaggcatcagagnnnnnnnnnnnnnnnnnnnn

SEQ ID NO: 49759 - RNA, 119 nt, synthetic construct; identical to SEQ ID NO: 49758
  misc_feature 1..4: note = linked via phosphorothioate
  modified_base 1: mod_base = OTHER; note = 2'-O-methyl-adenosine
  modified_base 2: mod_base = cm
  modified_base 3: mod_base = um
  misc_feature 117..119: note = linked via phosphorothioate
  modified_base 117: mod_base = OTHER; note = any 2'-O-methyl ribonucleotide
  modified_base 118: mod_base = OTHER; note = any 2'-O-methyl ribonucleotide
  modified_base 119: mod_base = OTHER; note = any 2'-O-methyl ribonucleotide
  source 1..119: mol_type = other RNA

SEQ ID NO: 49760 - RNA, 122 nt, synthetic construct
  misc_feature 1..4: note = linked via phosphorothioate
  modified_base 1: mod_base = OTHER; note = 2'-O-methyl-adenosine
  modified_base 2: mod_base = cm
  modified_base 3: mod_base = um
  misc_feature 119..122: note = linked via phosphorothioate
  modified_base 120: mod_base = um
  modified_base 121: mod_base = um
  modified_base 122: mod_base = um
  source 1..122: mol_type = other RNA
actggcgcttctatctgattactctgagcgccatcaccagcgactatgtcgtagtgggtaaagccgcttacggacttcggtccgtaagaggcatcagagnnnnnnnnnnnnnnnnnnnnttt

SEQ ID NO: 49761 - RNA, 119 nt, synthetic construct; identical to SEQ ID NO: 49758
  misc_feature 1..4: note = linked via phosphorothioate
  modified_base 1: mod_base = OTHER; note = 2'-O-methyl-adenosine
  modified_base 2: mod_base = cm
  modified_base 3: mod_base = um
  modified_base 4: mod_base = gm
  modified_base 5: mod_base = gm
  modified_base 6: mod_base = cm
  modified_base 7: mod_base = gm
  modified_base 8: mod_base = cm
  modified_base 9: mod_base = um
  modified_base 10: mod_base = um
  modified_base 11: mod_base = cm
  modified_base 12: mod_base = um
  modified_base 13: mod_base = OTHER; note = 2'-O-methyl-adenosine
  modified_base 14: mod_base = um
  modified_base 15: mod_base = cm
  modified_base 16: mod_base = um
  modified_base 17: mod_base = gm
  modified_base 18: mod_base = OTHER; note = 2'-O-methyl-adenosine
  modified_base 19: mod_base = um
  modified_base 27: mod_base = OTHER; note = 2'-O-methyl-adenosine
  modified_base 28: mod_base = gm
  modified_base 29: mod_base = cm
  modified_base 30: mod_base = gm
  modified_base 31: mod_base = cm
  modified_base 32: mod_base = cm
  modified_base 33: mod_base = OTHER; note = 2'-O-methyl-adenosine
  modified_base 34: mod_base = um
  modified_base 35: mod_base = cm
  modified_base 36: mod_base = OTHER; note = 2'-O-methyl-adenosine
  modified_base 37: mod_base = cm
  modified_base 38: mod_base = cm
  modified_base 44: mod_base = cm
  modified_base 45: mod_base = um
  modified_base 48: mod_base = gm
  modified_base 49: mod_base = um
  modified_base 50: mod_base = cm
  modified_base 51: mod_base = gm
  modified_base 57: mod_base = gm
  modified_base 58: mod_base = gm
  modified_base 59: mod_base = um
  modified_base 60: mod_base = OTHER; note = 2'-O-methyl-adenosine
  modified_base 61: mod_base = OTHER; note = 2'-O-methyl-adenosine
  modified_base 62: mod_base = OTHER; note = 2'-O-methyl-adenosine
  modified_base 63: mod_base = gm
  modified_base 64: mod_base = cm
  modified_base 65: mod_base = cm
  modified_base 66: mod_base = gm
  modified_base 67: mod_base = cm
  modified_base 68: mod_base = um
  modified_base 69: mod_base = um
  modified_base 70: mod_base = OTHER; note = 2'-O-methyl-adenosine
  modified_base 71: mod_base = cm
  modified_base 72: mod_base = gm
  modified_base 73: mod_base = gm
  modified_base 74: mod_base = OTHER; note = 2'-O-methyl-adenosine
  modified_base 75: mod_base = cm
  modified_base 76: mod_base = um
  modified_base 77: mod_base = um
  modified_base 78: mod_base = cm
  modified_base 79: mod_base = gm
  modified_base 80: mod_base = gm
  modified_base 81: mod_base = um
  modified_base 82: mod_base = cm
  modified_base 83: mod_base = cm
  modified_base 84: mod_base = gm
  modified_base 85: mod_base = um
  modified_base 86: mod_base = OTHER; note = 2'-O-methyl-adenosine
  modified_base 87: mod_base = OTHER; note = 2'-O-methyl-adenosine
  modified_base 88: mod_base = gm
  modified_base 89: mod_base = OTHER; note = 2'-O-methyl-adenosine
  modified_base 90: mod_base = gm
  modified_base 91: mod_base = gm
  modified_base 92: mod_base = cm
  modified_base 93: mod_base = OTHER; note = 2'-O-methyl-adenosine
  modified_base 94: mod_base = um
  modified_base 95: mod_base = cm
  modified_base 96: mod_base = OTHER; note = 2'-O-methyl-adenosine
  misc_feature 117..119: note = linked via phosphorothioate
  modified_base 117: mod_base = OTHER; note = any 2'-O-methyl ribonucleotide
  modified_base 118: mod_base = OTHER; note = any 2'-O-methyl ribonucleotide
  modified_base 119: mod_base = OTHER; note = any 2'-O-methyl ribonucleotide
  source 1..119: mol_type = other RNA

SEQ ID NO: 49762 - RNA, 119 nt, synthetic construct; identical to SEQ ID NO: 49758
  misc_feature 1..4: note = linked via phosphorothioate
  modified_base 1: mod_base = OTHER; note = 2'-O-methyl-adenosine
  modified_base 2: mod_base = cm
  modified_base 3: mod_base = um
  modified_base 4: mod_base = gm
  modified_base 5: mod_base = gm
  modified_base 6: mod_base = cm
  modified_base 7: mod_base = gm
  modified_base 8: mod_base = cm
  modified_base 13: mod_base = OTHER; note = 2'-O-methyl-adenosine
  modified_base 14: mod_base = um
  modified_base 15: mod_base = cm
  modified_base 16: mod_base = um
  modified_base 17: mod_base = gm
  modified_base 18: mod_base = OTHER; note = 2'-O-methyl-adenosine
  modified_base 19: mod_base = um
  modified_base 27: mod_base = OTHER; note = 2'-O-methyl-adenosine
  modified_base 28: mod_base = gm
  modified_base 29: mod_base = cm
  modified_base 30: mod_base = gm
  modified_base 31: mod_base = cm
  modified_base 32: mod_base = cm
  modified_base 33: mod_base = OTHER; note = 2'-O-methyl-adenosine
  modified_base 34: mod_base = um
  modified_base 35: mod_base = cm
  modified_base 36: mod_base = OTHER; note = 2'-O-methyl-adenosine
  modified_base 37: mod_base = cm
  modified_base 38: mod_base = cm
  modified_base 44: mod_base = cm
  modified_base 45: mod_base = um
  modified_base 48: mod_base = gm
  modified_base 49: mod_base = um
  modified_base 50: mod_base = cm
  modified_base 51: mod_base = gm
  modified_base 57: mod_base = gm
  modified_base 58: mod_base = gm
  modified_base 59: mod_base = um
  modified_base 60: mod_base = OTHER; note = 2'-O-methyl-adenosine
  modified_base 61: mod_base = OTHER; note = 2'-O-methyl-adenosine
  modified_base 62: mod_base = OTHER; note = 2'-O-methyl-adenosine
  modified_base 63: mod_base = gm
  modified_base 64: mod_base = cm
  modified_base 65: mod_base = cm
  modified_base 66: mod_base = gm
  modified_base 67: mod_base = cm
  modified_base 68: mod_base = um
  modified_base 69: mod_base = um
  modified_base 70: mod_base = OTHER; note = 2'-O-methyl-adenosine
  modified_base 71: mod_base = cm
  modified_base 72: mod_base = gm
  modified_base 73: mod_base = gm
  modified_base 74: mod_base = OTHER; note = 2'-O-methyl-adenosine
  modified_base 75: mod_base = cm
  modified_base 76: mod_base = um
  modified_base 77: mod_base = um
  modified_base 78: mod_base = cm
  modified_base 79: mod_base = gm
  modified_base 80: mod_base = gm
  modified_base 81: mod_base = um
  modified_base 82: mod_base = cm
  modified_base 83: mod_base = cm
  modified_base 84: mod_base = gm
  modified_base 85: mod_base = um
  modified_base 86: mod_base = OTHER; note = 2'-O-methyl-adenosine
  modified_base 87: mod_base = OTHER; note = 2'-O-methyl-adenosine
  modified_base 88: mod_base = gm
  modified_base 89: mod_base = OTHER; note = 2'-O-methyl-adenosine
  modified_base 90: mod_base = gm
  modified_base 91: mod_base = gm
  modified_base 92: mod_base = cm
  modified_base 93: mod_base = OTHER; note = 2'-O-methyl-adenosine
  modified_base 94: mod_base = um
  misc_feature 117..119: note = linked via phosphorothioate
  modified_base 117: mod_base = OTHER; note = any 2'-O-methyl ribonucleotide
  modified_base 118: mod_base = OTHER; note = any 2'-O-methyl ribonucleotide
  modified_base 119: mod_base = OTHER; note = any 2'-O-methyl ribonucleotide
  source 1..119: mol_type = other RNA

SEQ ID NO: 49763 - RNA, 119 nt, synthetic construct; identical to SEQ ID NO: 49758
  misc_feature 1..4: note = linked via phosphorothioate
  modified_base 1: mod_base = OTHER; note = 2'-O-methyl-adenosine
  modified_base 2: mod_base = cm
  modified_base 3: mod_base = um
  modified_base 44: mod_base = cm
  modified_base 45: mod_base = um
  modified_base 48: mod_base = gm
  modified_base 49: mod_base = um
  modified_base 50: mod_base = cm
  modified_base 51: mod_base = gm
  modified_base 60: mod_base = OTHER; note = 2'-O-methyl-adenosine
  modified_base 61: mod_base = OTHER; note = 2'-O-methyl-adenosine
  modified_base 62: mod_base = OTHER; note = 2'-O-methyl-adenosine
  modified_base 63: mod_base = gm
  modified_base 64: mod_base = cm
  modified_base 65: mod_base = cm
  modified_base 66: mod_base = gm
  modified_base 67: mod_base = cm
  modified_base 68: mod_base = um
  modified_base 69: mod_base = um
  modified_base 70: mod_base = OTHER; note = 2'-O-methyl-adenosine
  modified_base 71: mod_base = cm
  modified_base 72: mod_base = gm
  modified_base 73: mod_base = gm
  modified_base 74: mod_base = OTHER; note = 2'-O-methyl-adenosine
  modified_base 75: mod_base = cm
  modified_base 76: mod_base = um
  modified_base 77: mod_base = um
  modified_base 78: mod_base = cm
  modified_base 79: mod_base = gm
  modified_base 80: mod_base = gm
  modified_base 81: mod_base = um
  modified_base 82: mod_base = cm
  modified_base 83: mod_base = cm
  modified_base 84: mod_base = gm
  modified_base 85: mod_base = um
  modified_base 86: mod_base = OTHER; note = 2'-O-methyl-adenosine
  modified_base 87: mod_base = OTHER; note = 2'-O-methyl-adenosine
  modified_base 88: mod_base = gm
  modified_base 89: mod_base = OTHER; note = 2'-O-methyl-adenosine
  modified_base 90: mod_base = gm
  modified_base 91: mod_base = gm
  modified_base 92: mod_base = cm
  misc_feature 117..119: note = linked via phosphorothioate
  modified_base 117: mod_base = OTHER; note = any 2'-O-methyl ribonucleotide
  modified_base 118: mod_base = OTHER; note = any 2'-O-methyl ribonucleotide
  modified_base 119: mod_base = OTHER; note = any 2'-O-methyl ribonucleotide
  source 1..119: mol_type = other RNA

SEQ ID NO: 49764 - RNA, 119 nt, synthetic construct; identical to SEQ ID NO: 49758
  misc_feature 1..4: note = linked via phosphorothioate
  modified_base 1: mod_base = OTHER; note = 2'-O-methyl-adenosine
  modified_base 2: mod_base = cm
  modified_base 3: mod_base = um
  modified_base 60: mod_base = OTHER; note = 2'-O-methyl-adenosine
  modified_base 61: mod_base = OTHER; note = 2'-O-methyl-adenosine
  modified_base 62: mod_base = OTHER; note = 2'-O-methyl-adenosine
  modified_base 63: mod_base = gm
  modified_base 64: mod_base = cm
  modified_base 65: mod_base = cm
  modified_base 66: mod_base = gm
  modified_base 67: mod_base = cm
  modified_base 68: mod_base = um
  modified_base 69: mod_base = um
  modified_base 70: mod_base = OTHER; note = 2'-O-methyl-adenosine
  modified_base 71: mod_base = cm
  modified_base 72: mod_base = gm
  modified_base 73: mod_base = gm
  modified_base 74: mod_base = OTHER; note = 2'-O-methyl-adenosine
  modified_base 75: mod_base = cm
  modified_base 76: mod_base = um
  modified_base 77: mod_base = um
  modified_base 78: mod_base = cm
  modified_base 79: mod_base = gm
  modified_base 80: mod_base = gm
  modified_base 81: mod_base = um
  modified_base 82: mod_base = cm
  modified_base 83: mod_base = cm
  modified_base 84: mod_base = gm
  modified_base 85: mod_base = um
  modified_base 86: mod_base = OTHER; note = 2'-O-methyl-adenosine
  modified_base 87: mod_base = OTHER; note = 2'-O-methyl-adenosine
  modified_base 88: mod_base = gm
  modified_base 89: mod_base = OTHER; note = 2'-O-methyl-adenosine
  modified_base 90: mod_base = gm
  modified_base 91: mod_base = gm
  modified_base 92: mod_base = cm
  misc_feature 117..119: note = linked via phosphorothioate
  modified_base 117: mod_base = OTHER; note = any 2'-O-methyl ribonucleotide
  modified_base 118: mod_base = OTHER; note = any 2'-O-methyl ribonucleotide
  modified_base 119: mod_base = OTHER; note = any 2'-O-methyl ribonucleotide
  source 1..119: mol_type = other RNA

SEQ ID NO: 49765 - RNA, 119 nt, synthetic construct; identical to SEQ ID NO: 49758
  misc_feature 1..4: note = linked via phosphorothioate
  modified_base 1: mod_base = OTHER; note = 2'-O-methyl-adenosine
  modified_base 2: mod_base = cm
  modified_base 3: mod_base = um
  modified_base 6: mod_base = cm
  modified_base 8: mod_base = cm
  modified_base 9: mod_base = um
  modified_base 14: mod_base = um
  modified_base 15: mod_base = cm
  modified_base 27: mod_base = OTHER; note = 2'-O-methyl-adenosine
  modified_base 28: mod_base = gm
  modified_base 33: mod_base = OTHER; note = 2'-O-methyl-adenosine
  modified_base 34: mod_base = um
  modified_base 35: mod_base = cm
  modified_base 36: mod_base = OTHER; note = 2'-O-methyl-adenosine
  modified_base 37: mod_base = cm
  modified_base 42: mod_base = gm
  modified_base 43: mod_base = OTHER; note = 2'-O-methyl-adenosine
  modified_base 44: mod_base = cm
  modified_base 45: mod_base = um
  modified_base 48: mod_base = gm
  modified_base 49: mod_base = um
  modified_base 50: mod_base = cm
  modified_base 51: mod_base = gm
  modified_base 58: mod_base = gm
  modified_base 59: mod_base = um
  modified_base 60: mod_base = OTHER; note = 2'-O-methyl-adenosine
  modified_base 61: mod_base = OTHER; note = 2'-O-methyl-adenosine
  modified_base 63: mod_base = gm
  modified_base 64: mod_base = cm
  modified_base 65: mod_base = cm
  modified_base 66: mod_base = gm
  modified_base 67: mod_base = cm
  modified_base 68: mod_base = um
  modified_base 69: mod_base = um
  modified_base 70: mod_base = OTHER; note = 2'-O-methyl-adenosine
  modified_base 71: mod_base = cm
  modified_base 72: mod_base = gm
  modified_base 73: mod_base = gm
  modified_base 74: mod_base = OTHER; note = 2'-O-methyl-adenosine
  modified_base 75: mod_base = cm
  modified_base 76: mod_base = um
  modified_base 77: mod_base = um
  modified_base 78: mod_base = cm
  modified_base 79: mod_base = gm
  modified_base 80: mod_base = gm
  modified_base 81: mod_base = um
  modified_base 82: mod_base = cm
  modified_base 83: mod_base = cm
  modified_base 84: mod_base = gm
  modified_base 85: mod_base = um
  modified_base 86: mod_base = OTHER; note = 2'-O-methyl-adenosine
  modified_base 87: mod_base = OTHER; note = 2'-O-methyl-adenosine
  modified_base 88: mod_base = gm
  modified_base 89: mod_base = OTHER; note = 2'-O-methyl-adenosine
  modified_base 90: mod_base = gm
  modified_base 91: mod_base = gm
  modified_base 92: mod_base = cm
  modified_base 93: mod_base = OTHER; note = 2'-O-methyl-adenosine
  modified_base 94: mod_base = um
  misc_feature 116..119: note = linked via phosphorothioate
  modified_base 117: mod_base = OTHER; note = any 2'-O-methyl ribonucleotide
  modified_base 118: mod_base = OTHER; note = any 2'-O-methyl ribonucleotide
  modified_base 119: mod_base = OTHER; note = any 2'-O-methyl ribonucleotide
  source 1..119: mol_type = other RNA

SEQ ID NO: 49766 - RNA, 119 nt, synthetic construct; identical to SEQ ID NO: 49758
  misc_feature 1..4: note = linked via phosphorothioate
  modified_base 1: mod_base = OTHER; note = 2'-O-methyl-adenosine
  modified_base 2: mod_base = cm
  modified_base 3: mod_base = um
  modified_base 33: mod_base = OTHER; note = 2'-O-methyl-adenosine
  modified_base 34: mod_base = um
  modified_base 35: mod_base = cm
  modified_base 36: mod_base = OTHER; note = 2'-O-methyl-adenosine
  modified_base 37: mod_base = cm
  modified_base 42: mod_base = gm
  modified_base 43: mod_base = OTHER; note = 2'-O-methyl-adenosine
  modified_base 44: mod_base = cm
  modified_base 45: mod_base = um
  modified_base 48: mod_base = gm
  modified_base 49: mod_base = um
  modified_base 50: mod_base = cm
  modified_base 51: mod_base = gm
  modified_base 58: mod_base = gm
  modified_base 59: mod_base = um
  modified_base 60: mod_base = OTHER; note = 2'-O-methyl-adenosine
  modified_base 61: mod_base = OTHER; note = 2'-O-methyl-adenosine
  modified_base 63: mod_base = gm
  modified_base 64: mod_base = cm
  modified_base 65: mod_base = cm
  modified_base 66: mod_base = gm
  modified_base 67: mod_base = cm
  modified_base 68: mod_base = um
  modified_base 69: mod_base = um
  modified_base 70: mod_base = OTHER; note = 2'-O-methyl-adenosine
  modified_base 71: mod_base = cm
  modified_base 72: mod_base = gm
  modified_base 73: mod_base = gm
  modified_base 74: mod_base = OTHER; note = 2'-O-methyl-adenosine
  modified_base 75: mod_base = cm
  modified_base 76: mod_base = um
  modified_base 77: mod_base = um
  modified_base 78: mod_base = cm
  modified_base 79: mod_base = gm
  modified_base 80: mod_base = gm
  modified_base 81: mod_base = um
  modified_base 82: mod_base = cm
  modified_base 83: mod_base = cm
  modified_base 84: mod_base = gm
  modified_base 85: mod_base = um
  modified_base 86: mod_base = OTHER; note = 2'-O-methyl-adenosine
  modified_base 87: mod_base = OTHER; note = 2'-O-methyl-adenosine
  modified_base 88: mod_base = gm
  modified_base 89: mod_base = OTHER; note = 2'-O-methyl-adenosine
  modified_base 90: mod_base = gm
  modified_base 91: mod_base = gm
  modified_base 92: mod_base = cm
  modified_base 93: mod_base = OTHER; note = 2'-O-methyl-adenosine
  modified_base 94: mod_base = um
  misc_feature 116..119: note = linked via phosphorothioate
  modified_base 117: mod_base = OTHER; note = any 2'-O-methyl ribonucleotide
  modified_base 118: mod_base = OTHER; note = any 2'-O-methyl ribonucleotide
  modified_base 119: mod_base = OTHER; note = any 2'-O-methyl ribonucleotide
  source 1..119: mol_type = other RNA

SEQ ID NO: 49767 - RNA, 119 nt, synthetic construct; identical to SEQ ID NO: 49758
  misc_feature 1..4: note = linked via phosphorothioate
  modified_base 1: mod_base = OTHER; note = 2'-O-methyl-adenosine
  modified_base 2: mod_base = cm
  modified_base 3: mod_base = um
  modified_base 6: mod_base = cm
  modified_base 8: mod_base = cm
  modified_base 9: mod_base = um
  modified_base 14: mod_base = um
  modified_base 15: mod_base = cm
  modified_base 27: mod_base = OTHER; note = 2'-O-methyl-adenosine
  modified_base 28: mod_base = gm
  modified_base 42: mod_base = gm
  modified_base 43: mod_base = OTHER; note = 2'-O-methyl-adenosine
  modified_base 44: mod_base = cm
  modified_base 45: mod_base = um
  modified_base 48: mod_base = gm
  modified_base 49: mod_base = um
  modified_base 50: mod_base = cm
  modified_base 51: mod_base = gm
  modified_base 63: mod_base = gm
  modified_base 64: mod_base = cm
  modified_base 65: mod_base = cm
  modified_base 66: mod_base = gm
  modified_base 67: mod_base = cm
  modified_base 68: mod_base = um
  modified_base 69: mod_base = um
  modified_base 70: mod_base = OTHER; note = 2'-O-methyl-adenosine
  modified_base 71: mod_base = cm
  modified_base 72: mod_base = gm
  modified_base 73: mod_base = gm
  modified_base 74: mod_base = OTHER; note = 2'-O-methyl-adenosine
  modified_base 75: mod_base = cm
  modified_base 76: mod_base = um
  modified_base 77: mod_base = um
  modified_base 78: mod_base = cm
  modified_base 79: mod_base = gm
  modified_base 80: mod_base = gm
  modified_base 81: mod_base = um
  modified_base 82: mod_base = cm
  modified_base 83: mod_base = cm
  modified_base 84: mod_base = gm
  modified_base 85: mod_base = um
  modified_base 86: mod_base = OTHER; note = 2'-O-methyl-adenosine
  modified_base 87: mod_base = OTHER; note = 2'-O-methyl-adenosine
  modified_base 88: mod_base = gm
  modified_base 89: mod_base = OTHER; note = 2'-O-methyl-adenosine
  modified_base 90: mod_base = gm
  modified_base 91: mod_base = gm
  modified_base 92: mod_base = cm
  misc_feature 116..119: note = linked via phosphorothioate
  modified_base 117: mod_base = OTHER; note = any 2'-O-methyl ribonucleotide
  modified_base 118: mod_base = OTHER; note = any 2'-O-methyl ribonucleotide
  modified_base 119: mod_base = OTHER; note = any 2'-O-methyl ribonucleotide
  source 1..119: mol_type = other RNA

SEQ ID NO: 49768 - RNA, 109 nt, synthetic construct
  source 1..109: mol_type = other RNA
actggcgcttctatctgattactctgagcgccatcaccagcgactatgtcgtagtgggtaaagctccctcttcggagggagcatcagagnnnnnnnnnnnnnnnnnnnn

SEQ ID NO: 49769 - RNA, 109 nt, synthetic construct; identical to SEQ ID NO: 49768
  misc_feature 1..4: note = linked via phosphorothioate
  modified_base 1: mod_base = OTHER; note = 2'-O-methyl-adenosine
  modified_base 2: mod_base = cm
  modified_base 3: mod_base = um
  misc_feature 106..109: note = linked via phosphorothioate
  modified_base 107: mod_base = OTHER; note = any 2'-O-methyl ribonucleotide
  modified_base 108: mod_base = OTHER; note = any 2'-O-methyl ribonucleotide
  modified_base 109: mod_base = OTHER; note = any 2'-O-methyl ribonucleotide
  source 1..109: mol_type = other RNA

SEQ ID NO: 49770 - RNA, 112 nt, synthetic construct
  misc_feature 1..4: note = linked via phosphorothioate
  modified_base 1: mod_base = OTHER; note = 2'-O-methyl-adenosine
  modified_base 2: mod_base = cm
  modified_base 3: mod_base = um
  misc_feature 109..112: note = linked via phosphorothioate
  modified_base 110: mod_base = um
  modified_base 111: mod_base = um
  modified_base 112: mod_base = um
  source 1..112: mol_type = other RNA
actggcgcttctatctgattactctgagcgccatcaccagcgactatgtcgtagtgggtaaagctccctcttcggagggagcatcagagnnnnnnnnnnnnnnnnnnnnttt

SEQ ID NO: 49771 - RNA, 109 nt, synthetic construct; identical to SEQ ID NO: 49768
  misc_feature 1..4: note = linked via phosphorothioate
  modified_base 1: mod_base = OTHER; note = 2'-O-methyl-adenosine
  modified_base 2: mod_base = cm
  modified_base 3: mod_base = um
  modified_base 4: mod_base = gm
  modified_base 5: mod_base = gm
  modified_base 6: mod_base = cm
  modified_base 7: mod_base = gm
  modified_base 8: mod_base = cm
  modified_base 9: mod_base = um
  modified_base 10: mod_base = um
  modified_base 11: mod_base = cm
  modified_base 12: mod_base = um
  modified_base 13: mod_base = OTHER; note = 2'-O-methyl-adenosine
  modified_base 14: mod_base = um
  modified_base 15: mod_base = cm
  modified_base 16: mod_base = um
  modified_base 17: mod_base = gm
  modified_base 18: mod_base = OTHER; note = 2'-O-methyl-adenosine
  modified_base 19: mod_base = um
  modified_base 27: mod_base = OTHER; note = 2'-O-methyl-adenosine
  modified_base 28: mod_base = gm
  modified_base 29: mod_base = cm
  modified_base 30: mod_base = gm
  modified_base 31: mod_base = cm
  modified_base 32: mod_base = cm
  modified_base 33: mod_base = OTHER; note = 2'-O-methyl-adenosine
  modified_base 34: mod_base = um
  modified_base 35: mod_base = cm
  modified_base 36: mod_base = OTHER; note = 2'-O-methyl-adenosine
  modified_base 37: mod_base = cm
  modified_base 38: mod_base = cm
  modified_base 44: mod_base = cm
  modified_base 45: mod_base = um
  modified_base 48: mod_base = gm
  modified_base 49: mod_base = um
  modified_base 50: mod_base = cm
  modified_base 51: mod_base = gm
  modified_base 57: mod_base = gm
  modified_base 58: mod_base = gm
  modified_base 59: mod_base = um
  modified_base 60: mod_base = OTHER; note = 2'-O-methyl-adenosine
  modified_base 61: mod_base = OTHER; note = 2'-O-methyl-adenosine
  modified_base 62: mod_base = OTHER; note = 2'-O-methyl-adenosine
  modified_base 63: mod_base = gm
  modified_base 64: mod_base = cm
  modified_base 65: mod_base = um
  modified_base 66: mod_base = cm
  modified_base 67: mod_base = cm
  modified_base 68: mod_base = cm
  modified_base 69: mod_base = um
  modified_base 70: mod_base = cm
  modified_base 71: mod_base = um
  modified_base 72: mod_base = um
  modified_base 73: mod_base = cm
  modified_base 74: mod_base = gm
  modified_base 75: mod_base = gm
  modified_base 76: mod_base = OTHER; note = 2'-O-methyl-adenosine
  modified_base 77: mod_base = gm
  modified_base 78: mod_base = gm
  modified_base 79: mod_base = gm
  modified_base 80: mod_base = OTHER; note = 2'-O-methyl-adenosine
  modified_base 81: mod_base = gm
  modified_base 82: mod_base = cm
  modified_base 83: mod_base = OTHER; note = 2'-O-methyl-adenosine
  modified_base 84: mod_base = um
  modified_base 85: mod_base = cm
  modified_base 86: mod_base = OTHER; note = 2'-O-methyl-adenosine
  misc_feature 106..109: note = linked via phosphorothioate
  modified_base 107: mod_base = OTHER; note = any 2'-O-methyl ribonucleotide
  modified_base 108: mod_base = OTHER; note = any 2'-O-methyl ribonucleotide
  modified_base 109: mod_base = OTHER; note = any 2'-O-methyl ribonucleotide
  source 1..109: mol_type = other RNA

SEQ ID NO: 49772 - RNA, 109 nt, synthetic construct; identical to SEQ ID NO: 49768
  misc_feature 1..4: note = linked via phosphorothioate
  modified_base 1: mod_base = OTHER; note = 2'-O-methyl-adenosine
  modified_base 2: mod_base = cm
  modified_base 3: mod_base = um
  modified_base 4: mod_base = gm
  modified_base 5: mod_base = gm
  modified_base 6: mod_base = cm
  modified_base 7: mod_base = gm
  modified_base 8: mod_base = cm
  modified_base 13: mod_base = OTHER; note = 2'-O-methyl-adenosine
  modified_base 14: mod_base = um
  modified_base 15: mod_base = cm
  modified_base 16: mod_base = um
  modified_base 17: mod_base = gm
  modified_base 18: mod_base = OTHER; note = 2'-O-methyl-adenosine
  modified_base 19: mod_base = um
  modified_base 27: mod_base = OTHER; note = 2'-O-methyl-adenosine
  modified_base 28: mod_base = gm
  modified_base 29: mod_base = cm
  modified_base 30: mod_base = gm
  modified_base 31: mod_base = cm
  modified_base 32: mod_base = cm
  modified_base 33: mod_base = OTHER; note = 2'-O-methyl-adenosine
  modified_base 34: mod_base = um
  modified_base 35: mod_base = cm
  modified_base 36: mod_base = OTHER; note = 2'-O-methyl-adenosine
  modified_base 37: mod_base = cm
  modified_base 38: mod_base = cm
  modified_base 44: mod_base = cm
  modified_base 45: mod_base = um
  modified_base 48: mod_base = gm
  modified_base 49: mod_base = um
  modified_base 50: mod_base = cm
  modified_base 51: mod_base = gm
  modified_base 57: mod_base = gm
  modified_base 58: mod_base = gm
  modified_base 59: mod_base = um
  modified_base 60: mod_base = OTHER; note = 2'-O-methyl-adenosine
  modified_base 61: mod_base = OTHER; note = 2'-O-methyl-adenosine
  modified_base 62: mod_base = OTHER; note = 2'-O-methyl-adenosine
  modified_base 63: mod_base = gm
  modified_base 64: mod_base = cm
  modified_base 65: mod_base = um
  modified_base 66: mod_base = cm
  modified_base 67: mod_base = cm
  modified_base 68: mod_base = cm
  modified_base 69: mod_base = um
  modified_base 70: mod_base = cm
  modified_base 71: mod_base = um
  modified_base 72: mod_base = um
  modified_base 73: mod_base = cm
  modified_base 74: mod_base = gm
  modified_base 75: mod_base = gm
  modified_base 76: mod_base = OTHER; note = 2'-O-methyl-adenosine
  modified_base 77: mod_base = gm
  modified_base 78: mod_base = gm
  modified_base 79: mod_base = gm
  modified_base 80: mod_base = OTHER; note = 2'-O-methyl-adenosine
  modified_base 81: mod_base = gm
  modified_base 82: mod_base = cm
  modified_base 83: mod_base = OTHER; note = 2'-O-methyl-adenosine
  modified_base 84: mod_base = um
  misc_feature 106..109: note = linked via phosphorothioate
  modified_base 107: mod_base = OTHER; note = any 2'-O-methyl ribonucleotide
  modified_base 108: mod_base = OTHER; note = any 2'-O-methyl ribonucleotide
  modified_base 109: mod_base = OTHER; note = any 2'-O-methyl ribonucleotide
  source 1..109: mol_type = other RNA

SEQ ID NO: 49773 - RNA, 109 nt, synthetic construct; identical to SEQ ID NO: 49768
  misc_feature 1..4: note = linked via phosphorothioate
  modified_base 1: mod_base = OTHER; note = 2'-O-methyl-adenosine
  modified_base 2: mod_base = cm
  modified_base 3: mod_base = um
  modified_base 44: mod_base = cm
  modified_base 45: mod_base = um
  modified_base 48: mod_base = gm
  modified_base 49: mod_base = um
  modified_base 50: mod_base = cm
  modified_base 51: mod_base = gm
  modified_base 63: mod_base = gm
  modified_base 64: mod_base = cm
  modified_base 65: mod_base = um
  modified_base 66: mod_base = cm
  modified_base 67: mod_base = cm
  modified_base 68: mod_base = cm
  modified_base 69: mod_base = um
  modified_base 70: mod_base = cm
  modified_base 71: mod_base = um
  modified_base 72: mod_base = um
  modified_base 73: mod_base = cm
  modified_base 74: mod_base = gm
  modified_base 75: mod_base = gm
  modified_base 76: mod_base = OTHER; note = 2'-O-methyl-adenosine
  modified_base 77: mod_base = gm
  modified_base 78: mod_base = gm
  modified_base 79: mod_base = gm
  modified_base 80: mod_base = OTHER; note = 2'-O-methyl-adenosine
  modified_base 81: mod_base = gm
  modified_base 82: mod_base = cm
  misc_feature 106..109: note = linked via phosphorothioate
  modified_base 107: mod_base = OTHER; note = any 2'-O-methyl ribonucleotide
  modified_base 108: mod_base = OTHER; note = any 2'-O-methyl ribonucleotide
  modified_base 109: mod_base = OTHER; note = any 2'-O-methyl ribonucleotide
  source 1..109: mol_type = other RNA

SEQ ID NO: 49774 - RNA, 109 nt, synthetic construct; identical to SEQ ID NO: 49768
  misc_feature 1..4: note = linked via phosphorothioate
  modified_base 1: mod_base = OTHER; note = 2'-O-methyl-adenosine
  modified_base 2: mod_base = cm
  modified_base 3: mod_base = um
  modified_base 63: mod_base = gm
  modified_base 64: mod_base = cm
  modified_base 65: mod_base = um
  modified_base 66: mod_base = cm
  modified_base 67: mod_base = cm
  modified_base 68: mod_base = cm
  modified_base 69: mod_base = um
  modified_base 70: mod_base = cm
  modified_base 71: mod_base = um
  modified_base 72: mod_base = um
  modified_base 73: mod_base = cm
  modified_base 74: mod_base = gm
  modified_base 75: mod_base = gm
  modified_base 76: mod_base = OTHER; note = 2'-O-methyl-adenosine
  modified_base 77: mod_base = gm
  modified_base 78: mod_base = gm
  modified_base 79: mod_base = gm
  modified_base 80: mod_base = OTHER; note = 2'-O-methyl-adenosine
  modified_base 81: mod_base = gm
  modified_base 82: mod_base = cm
  misc_feature 106..109: note = linked via phosphorothioate
  modified_base 107: mod_base = OTHER; note = any 2'-O-methyl ribonucleotide
  modified_base 108: mod_base = OTHER; note = any 2'-O-methyl ribonucleotide
  modified_base 109: mod_base = OTHER; note = any 2'-O-methyl ribonucleotide
  source 1..109: mol_type = other RNA

SEQ ID NO: 49775 - RNA, 109 nt, synthetic construct; identical to SEQ ID NO: 49768
  misc_feature 1..4: note = linked via phosphorothioate
  modified_base 1: mod_base = OTHER; note = 2'-O-methyl-adenosine
  modified_base 2: mod_base = cm
  modified_base 3: mod_base = um
  modified_base 6: mod_base = cm
  modified_base 8: mod_base = cm
  modified_base 9: mod_base = um
  modified_base 14: mod_base = um
  modified_base 15: mod_base = cm
  modified_base 27: mod_base = OTHER; note = 2'-O-methyl-adenosine
  modified_base 28: mod_base = gm
  modified_base 33: mod_base = OTHER; note = 2'-O-methyl-adenosine
  modified_base 34: mod_base = um
  modified_base 35: mod_base = cm
  modified_base 36: mod_base = OTHER; note = 2'-O-methyl-adenosine
  modified_base 37: mod_base = cm
  modified_base 42: mod_base = gm
  modified_base 43: mod_base = OTHER; note = 2'-O-methyl-adenosine
  modified_base 44: mod_base = cm
  modified_base 45: mod_base = um
  modified_base 48: mod_base = gm
  modified_base 49: mod_base = um
  modified_base 50: mod_base = cm
  modified_base 51: mod_base = gm
  modified_base 58: mod_base = gm
  modified_base 59: mod_base = um
  modified_base 60: mod_base = OTHER; note = 2'-O-methyl-adenosine
  modified_base 61: mod_base = OTHER; note = 2'-O-methyl-adenosine
  modified_base 63: mod_base = gm
  modified_base 64: mod_base = cm
  modified_base 65: mod_base = um
  modified_base 66: mod_base = cm
  modified_base 67: mod_base = cm
  modified_base 68: mod_base = cm
  modified_base 69: mod_base = um
  modified_base 70: mod_base = cm
  modified_base 71: mod_base = um
  modified_base 72: mod_base = um
  modified_base 73: mod_base = cm
  modified_base 74: mod_base = gm
  modified_base 75: mod_base = gm
  modified_base 76: mod_base = OTHER; note = 2'-O-methyl-adenosine
  modified_base 77: mod_base = gm
  modified_base 78: mod_base = gm
  modified_base 79: mod_base = gm
  modified_base 80: mod_base = OTHER; note = 2'-O-methyl-adenosine
  modified_base 81: mod_base = gm
  modified_base 82: mod_base = cm
  modified_base 83: mod_base = OTHER; note = 2'-O-methyl-adenosine
  modified_base 84: mod_base = um
  misc_feature 106..109: note = linked via phosphorothioate
  modified_base 107: mod_base = OTHER; note = any 2'-O-methyl ribonucleotide
  modified_base 108: mod_base = OTHER; note = any 2'-O-methyl ribonucleotide
  modified_base 109: mod_base = OTHER; note = any 2'-O-methyl ribonucleotide
  source 1..109: mol_type = other RNA

SEQ ID NO: 49776 - RNA, 109 nt, synthetic construct; identical to SEQ ID NO: 49768
  misc_feature 1..4: note = linked via phosphorothioate
  modified_base 1: mod_base = OTHER; note = 2'-O-methyl-adenosine
  modified_base 2: mod_base = cm
  modified_base 3: mod_base = um
  modified_base 33: mod_base = OTHER; note = 2'-O-methyl-adenosine
  modified_base 34: mod_base = um
  modified_base 35: mod_base = cm
  modified_base 36: mod_base = OTHER; note = 2'-O-methyl-adenosine
  modified_base 37: mod_base = cm
  modified_base 42: mod_base = gm
  modified_base 43: mod_base = OTHER; note = 2'-O-methyl-adenosine
  modified_base 44: mod_base = cm
  modified_base 45: mod_base = um
  modified_base 48: mod_base = gm
  modified_base 49: mod_base = um
  modified_base 50: mod_base = cm
  modified_base 51: mod_base = gm
  modified_base 58: mod_base = gm
  modified_base 59: mod_base = um
  modified_base 60: mod_base = OTHER; note = 2'-O-methyl-adenosine
  modified_base 61: mod_base = OTHER; note = 2'-O-methyl-adenosine
  modified_base 63: mod_base = gm
  modified_base 64: mod_base = cm
  modified_base 65: mod_base = um
  modified_base 66: mod_base = cm
  modified_base 67: mod_base = cm
  modified_base 68: mod_base = cm
  modified_base 69: mod_base = um
  modified_base 70: mod_base = cm
  modified_base 71: mod_base = um
  modified_base 72: mod_base = um
  modified_base 73: mod_base = cm
  modified_base 74: mod_base = gm
  modified_base 75: mod_base = gm
  modified_base 76: mod_base = OTHER; note = 2'-O-methyl-adenosine
  modified_base 77: mod_base = gm
  modified_base 78: mod_base = gm
  modified_base 79: mod_base = gm
  modified_base 80: mod_base = OTHER; note = 2'-O-methyl-adenosine
  modified_base 81: mod_base = gm
  modified_base 82: mod_base = cm
  modified_base 83: mod_base = OTHER; note = 2'-O-methyl-adenosine
  modified_base 84: mod_base = um
  misc_feature 106..109: note = linked via phosphorothioate
  modified_base 107: mod_base = OTHER; note = any 2'-O-methyl ribonucleotide
  modified_base 108: mod_base = OTHER; note = any 2'-O-methyl ribonucleotide
  modified_base 109: mod_base = OTHER; note = any 2'-O-methyl ribonucleotide
  source 1..109: mol_type = other RNA

SEQ ID NO: 49777 - RNA, 109 nt, synthetic construct; identical to SEQ ID NO: 49768
  misc_feature 1..4: note = linked via phosphorothioate
  modified_base 1: mod_base = OTHER; note = 2'-O-methyl-adenosine
  modified_base 2: mod_base = cm
  modified_base 3: mod_base = um
  modified_base 6: mod_base = cm
  modified_base 8: mod_base = cm
  modified_base 9: mod_base = um
  modified_base 14: mod_base = um
  modified_base 15: mod_base = cm
  modified_base 27: mod_base = OTHER; note = 2'-O-methyl-adenosine
  modified_base 28: mod_base = gm
  modified_base 42: mod_base = gm
  modified_base 43: mod_base = OTHER; note = 2'-O-methyl-adenosine
  modified_base 44: mod_base = cm
  modified_base 45: mod_base = um
  modified_base 48: mod_base = gm
  modified_base 49: mod_base = um
  modified_base 50: mod_base = cm
  modified_base 51: mod_base = gm
  modified_base 63: mod_base = gm
  modified_base 64: mod_base = cm
  modified_base 65: mod_base = um
  modified_base 66: mod_base = cm
  modified_base 67: mod_base = cm
  modified_base 68: mod_base = cm
  modified_base 69: mod_base = um
  modified_base 70: mod_base = cm
  modified_base 71: mod_base = um
  modified_base 72: mod_base = um
  modified_base 73: mod_base = cm
  modified_base 74: mod_base = gm
  modified_base 75: mod_base = gm
  modified_base 76: mod_base = OTHER; note = 2'-O-methyl-adenosine
  modified_base 77: mod_base = gm
  modified_base 78: mod_base = gm
  modified_base 79: mod_base = gm
  modified_base 80: mod_base = OTHER; note = 2'-O-methyl-adenosine
  modified_base 81: mod_base = gm
  modified_base 82: mod_base = cm
  misc_feature 106..109: note = linked via phosphorothioate
  modified_base 107: mod_base = OTHER; note = any 2'-O-methyl ribonucleotide
  modified_base 108: mod_base = OTHER; note = any 2'-O-methyl ribonucleotide
  modified_base 109: mod_base = OTHER; note = any 2'-O-methyl ribonucleotide
  source 1..109: mol_type = other RNA

SEQ ID NO: 49778 - RNA, 107 nt, synthetic construct; identical to SEQ ID NO: 513
  misc_feature 1..4: note = linked via phosphorothioate
  modified_base 1: mod_base = OTHER; note = 2'-O-methyl-adenosine
  modified_base 2: mod_base = cm
  modified_base 3: mod_base = um
  misc_feature 104..107: note = linked via phosphorothioate
  modified_base 105: mod_base = cm
  modified_base 106: mod_base = um
  modified_base 107: mod_base = cm
  source 1..107: mol_type = other RNA

SEQ ID NO: 49779 - RNA, 119 nt, synthetic construct; identical to SEQ ID NO: 522
  misc_feature 1..4: note = linked via phosphorothioate
  modified_base 1: mod_base = OTHER; note = 2'-O-methyl-adenosine
  modified_base 2: mod_base = cm
  modified_base 3: mod_base = um
  modified_base 4: mod_base = gm
  modified_base 5: mod_base = gm
  modified_base 6: mod_base = cm
  modified_base 7: mod_base = gm
  modified_base 8: mod_base = cm
  modified_base 9: mod_base = um
  modified_base 10: mod_base = um
  modified_base 11: mod_base = cm
  modified_base 12: mod_base = um
  modified_base 13: mod_base = OTHER; note = 2'-O-methyl-adenosine
  modified_base 14: mod_base = um
  modified_base 15: mod_base = cm
  modified_base 16: mod_base = um
  modified_base 17: mod_base = gm
  modified_base 18: mod_base = OTHER; note = 2'-O-methyl-adenosine
  modified_base 19: mod_base = um
  modified_base 27: mod_base = OTHER; note = 2'-O-methyl-adenosine
  modified_base 28: mod_base = gm
  modified_base 29: mod_base = cm
  modified_base 30: mod_base = gm
  modified_base 31: mod_base = cm
  modified_base 32: mod_base = cm
  modified_base 33: mod_base = OTHER; note = 2'-O-methyl-adenosine
  modified_base 34: mod_base = um
  modified_base 35: mod_base = cm
  modified_base 36: mod_base = OTHER; note = 2'-O-methyl-adenosine
  modified_base 37: mod_base = cm
  modified_base 38: mod_base = cm
  modified_base 44: mod_base = cm
  modified_base 45: mod_base = um
  modified_base 48: mod_base = gm
  modified_base 49: mod_base = um
  modified_base 50: mod_base = cm
  modified_base 51: mod_base = gm
  modified_base 57: mod_base = gm
  modified_base 58: mod_base = gm
  modified_base 59: mod_base = um
  modified_base 60: mod_base = OTHER; note = 2'-O-methyl-adenosine
  modified_base 61: mod_base = OTHER; note = 2'-O-methyl-adenosine
  modified_base 62: mod_base = OTHER; note = 2'-O-methyl-adenosine
  modified_base 63: mod_base = gm
  modified_base 64: mod_base = cm
  modified_base 65: mod_base = cm
  modified_base 66: mod_base = gm
  modified_base 67: mod_base = cm
  modified_base 68: mod_base = um
  modified_base 69: mod_base = um
  modified_base 70: mod_base = OTHER; note = 2'-O-methyl-adenosine
  modified_base 71: mod_base = cm
  modified_base 72: mod_base = gm
  modified_base 73: mod_base = gm
  modified_base 74: mod_base = OTHER; note = 2'-O-methyl-adenosine
  modified_base 75: mod_base = cm
  modified_base 76: mod_base = um
  modified_base 77: mod_base = um
  modified_base 78: mod_base = cm
  modified_base 79: mod_base = gm
  modified_base 80: mod_base = gm
  modified_base 81: mod_base = um
  modified_base 82: mod_base = cm
  modified_base 83: mod_base = cm
  modified_base 84: mod_base = gm
  modified_base 85: mod_base = um
  modified_base 86: mod_base = OTHER; note = 2'-O-methyl-adenosine
  modified_base 87: mod_base = OTHER; note = 2'-O-methyl-adenosine
  modified_base 88: mod_base = gm
  modified_base 89: mod_base = OTHER; note = 2'-O-methyl-adenosine
  modified_base 90: mod_base = gm
  modified_base 91: mod_base = gm
  modified_base 92: mod_base = cm
  modified_base 93: mod_base = OTHER; note = 2'-O-methyl-adenosine
  modified_base 94: mod_base = um
  modified_base 95: mod_base = cm
  modified_base 96: mod_base = OTHER; note = 2'-O-methyl-adenosine
  misc_feature 117..119: note = linked via phosphorothioate
  modified_base 117: mod_base = um
  modified_base 118: mod_base = gm
  modified_base 119: mod_base = OTHER; note = 2'-O-methyl-adenosine
  source 1..119: mol_type = other RNA

SEQ ID NO: 49780 - RNA, 109 nt, synthetic construct; identical to SEQ ID NO: 529
  misc_feature 1..4: note = linked via phosphorothioate
  modified_base 1: mod_base = OTHER; note = 2'-O-methyl-adenosine
  modified_base 2: mod_base = cm
  modified_base 3: mod_base = um
  misc_feature 106..109: note = linked via phosphorothioate
  modified_base 107: mod_base = OTHER; note = 2'-O-methyl-adenosine
  modified_base 108: mod_base = um
  modified_base 109: mod_base = gm
  source 1..109: mol_type = other RNA

SEQ ID NO: 49781 - RNA, 109 nt, synthetic construct
  source 1..109: mol_type = other RNA
actggcgcttttatctgattactttgagagccatcaccagcgactatgtcgtagtgggtaaagctccctcttcggagggagcatcaaagagaagatgggcgggagtctt

SEQ ID NO: 49782 - RNA, 112 nt, synthetic construct
  misc_feature 1..4: note = linked via phosphorothioate
  modified_base 1: mod_base = OTHER; note = 2'-O-methyl-adenosine
  modified_base 2: mod_base = cm
  modified_base 3: mod_base = um
  misc_feature 109..112: note = linked via phosphorothioate
  modified_base 110: mod_base = um
  modified_base 111: mod_base = um
  modified_base 112: mod_base = um
  source 1..112: mol_type = other RNA
actggcgcttttatctgattactttgagagccatcaccagcgactatgtcgtagtgggtaaagctccctcttcggagggagcatcaaagagaagatgggcgggagtcttttt

SEQ ID NO: 49783 - RNA, 109 nt, synthetic construct
  source 1..109: mol_type = other RNA
actggcgcttctatctgattactctgagcgccatcaccagcgactatgtcgtagtgggtaaagctccctcttcggagggagcatcagagagaagatgggcgggagtctt

SEQ ID NO: 49784 - RNA, 109 nt, synthetic construct; identical to SEQ ID NO: 49783
  misc_feature 1..4: note = linked via phosphorothioate
  modified_base 1: mod_base = OTHER; note = 2'-O-methyl-adenosine
  modified_base 2: mod_base = cm
  modified_base 3: mod_base = um
  misc_feature 106..109: note = linked via phosphorothioate
  modified_base 107: mod_base = cm
  modified_base 108: mod_base = um
  modified_base 109: mod_base = um
  source 1..109: mol_type = other RNA

SEQ ID NO: 49785 - RNA, 109 nt, synthetic construct; identical to SEQ ID NO: 49783
  misc_feature 1..4: note = linked via phosphorothioate
  modified_base 1: mod_base = OTHER; note = 2'-O-methyl-adenosine
  modified_base 2: mod_base = cm
  modified_base 3: mod_base = um
  modified_base 44: mod_base = cm
  modified_base 45: mod_base = um
  modified_base 48: mod_base = gm
  modified_base 49: mod_base = um
  modified_base 50: mod_base = cm
  modified_base 51: mod_base = gm
  modified_base 63: mod_base = gm
  modified_base 64: mod_base = cm
  modified_base 65: mod_base = um
  modified_base 66: mod_base = cm
  modified_base 67: mod_base = cm
  modified_base 68: mod_base = cm
  modified_base 69: mod_base = um
  modified_base 70: mod_base = cm
  modified_base 71: mod_base = um
  modified_base 72: mod_base = um
  modified_base 73: mod_base = cm
  modified_base 74: mod_base = gm
  modified_base 75: mod_base = gm
  modified_base 76: mod_base = OTHER; note = 2'-O-methyl-adenosine
  modified_base 77: mod_base = gm
  modified_base 78: mod_base = gm
  modified_base 79: mod_base = gm
  modified_base 80: mod_base = OTHER; note = 2'-O-methyl-adenosine
  modified_base 81: mod_base = gm
  modified_base 82: mod_base = cm
  misc_feature 107..109: note = linked via phosphorothioate
  modified_base 107: mod_base = cm
  modified_base 108: mod_base = um
  modified_base 109: mod_base = um
  source 1..109: mol_type = other RNA

SEQ ID NO: 49786 - DNA, 14 bp, synthetic construct
  source 1..14: mol_type = other DNA
gaccggccgccacc

SEQ ID NO: 49787 - DNA, 39 bp, synthetic construct
  source 1..39: mol_type = other DNA
atggccccagcggccaaacgggtgaagctggactctaga

SEQ ID NO: 49788 - DNA, 2931 bp, synthetic construct
  source 1..2931: mol_type = other DNA
caagagatcaagagaatcaacaagatcagaaggagactggtcaaggacagcaacacaaagaaggccggcaagacaggccccatgaaaaccctgctcgtcagagtgatgacccctgacctgagagagcggctggaaaacctgagaaagaagcccgagaacatccctcagcctatcagcaacaccagcagggccaacctgaacaagctgctgaccgactacaccgagatgaagaaagccatcctgcacgtgtactgggaagagttccagaaagaccccgtgggcctgatgagcagagttgctcagcctgccagcaagaagatcgaccagaacaagctgaagcccgagatggacgagaagggcaatctgaccacagccggctttgcctgctctcagtgtggccagcctctgttcgtgtacaagctggaacaggtgtccgagaaaggcaaggcctacaccaactacttcggcagatgtaacgtggccgagcacgagaagctgattctgctggcccagctgaaacctgagaaggactctgatgaggccgtgacctacagcctgggcaagtttggacagagagccctggacttctacagcatccacgtgaccaaagaaagcacacaccccgtgaagcccctggctcagatcgccggcaatagatacgcctctggacctgtgggcaaagccctgtccgatgcctgcatgggaacaatcgccagcttcctgagcaagtaccaggacatcatcatcgagcaccagaaggtggtcaagggcaaccagaagagactggaaagcctgagggagctggccggcaaagagaacctggaataccccagcgtgaccctgcctcctcagcctcacacaaaagaaggcgtggacgcctacaacgaagtgatcgccagagtgagaatgtgggtcaacctgaacctgtggcagaagctgaaactgtccagggacgacgccaagcctctgctgagactgaagggcttccctagcttccctctggtggaaagacaggccaatgaagtggattggtgggacatggtctgcaacgtgaagaagctgatcaacgagaagaaagaggatggcaaggttttctggcagaacctggccggctacaagagacaagaagccctgaggccttacctgagcagcgaagaggaccggaagaagggcaagaagttcgccagataccagctgggcgacctgctgctgcacctggaaaagaagcacggcgaggactggggcaaagtgtacgatgaggcctgggagagaatcgacaagaaggtggaaggcctgagcaagcacattaagctggaagaggaaagaaggagcgaggacgcccaatctaaagccgctctgaccgattggctgagagccaaggccagctttgtgatcgagggcctgaaagaggccgacaaggacgagttctgcagatgcgagctgaagctgcagaagtggtacggcgatctgagaggcaagcccttcgccattgaggccgagaacagcatcctggacatcagcggcttcagcaagcagtacaactgcgccttcatttggcagaaagacggcgtcaagaaactgaacctgtacctgatcatcaattacttcaaaggcggcaagctgcggttcaagaagatcaaacccgaggccttcgaggctaacagattctacaccgtgatcaacaaaaagtccggcgagatcgtgcccatggaagtgaacttcaacttcgacgaccccaacctgattatcctgcctctggccttcggcaagagacagggcagagagttcatctggaacgatctgctgagcctggaaaccggctctctgaagctggccaatggcagagtgatcgagaaaaccctgtacaacaggagaaccagacaggacgagcctgctctgtttgtggccctgaccttcgagagaagagaggtgctggacagcagcaacatcaagcccatgaacctgatcggcgtggaccggggcgagaatatccctgctgtgatcgccctgacagaccctgaaggatgcccactgagcagattcaaggactccctgggcaaccctacacacatcctgagaatcggcgagagctacaaagagaagcagaggacaatccaggccaagaaagaggtggaacagcgcagagccggcggatactctaggaagtacgccagcaaggccaagaatctggccgacgacatggtccgaaacaccgccagagatctgctgtactacgccgtgacacaggacgccatgctgatcttcgagaatctgagcagaggcttcggccggcagggcaagagaacctttatggccgagaggcagtacaccagaatggaagattggctcacagctaaactggcctacgagggactgagcaagacctacctgtccaaaacactggcccagtatacctccaagacctgcagcaattgcggcttcaccatcaccagcgccgactacgacagagtgctggaaaagctcaagaaaaccgccaccggctggatgaccaccatcaacggcaaagagctgaaggttgagggccagatcacctactacaacaggtacaagaggcagaacgtcgtgaaggatctgagcgtggaactggacagactgagcgaagagagcgtgaacaacgacatcagcagctggacaaagggcagatcaggcgaggctctgagcctgctgaagaagaggtttagccacagacctgtgcaagagaagttcgtgtgcctgaactgcggcttcgagacacacgccgatgaacaggctgccctgaacattgccagaagctggctgttcctgagaagccaagagtacaagaagtaccagaccaacaagaccaccggcaacaccgacaagagggcctttgtggaaacctggcagagcttctacagaaaaaagctgaaagaagtctggaagcccgccgtg

SEQ ID NO: 49789 - DNA, 42 bp, synthetic construct
  source 1..42: mol_type = other DNA
ggctcccccgccgcgaagcgagtgaaactggacggatccggc

SEQ ID NO: 49790 - DNA, 756 bp, synthetic construct
  source 1..756: mol_type = other DNA
gcaacaaacttctctctgctgaaacaagccggagatgtcgaagagaatcctggaccgatggtatcaaagggtgaggcggtcattaaggaattcatgcggttcaaagttcacatggaggggagtatgaatggtcacgaatttgagatcgagggtgagggagagggtagaccttacgaaggcacccagacagcaaaactcaaagtcactaagggcggcccactccctttctcatgggatatactgagtcctcaatttatgtatggctcccgggcctttatcaagcatccagccgacatacccgattactataaacagtcattccccgagggattcaaatgggagagagtgatgaattttgaagacgggggtgccgtgaccgtaactcaagatacctctttggaagatggtaccctcatttacaaggttaagcttagaggaactaatttcccaccagacggacccgttatgcagaaaaaaaccatgggttgggaggctagcaccgaacggctgtatccagaggatggagttttgaaaggtgatattaagatggccctgcgcctgaaagacggagggcggtacctcgcagatttcaaaactacctacaaagctaagaaaccggtccaaatgccgggtgcttataacgtcgataggaagctggatataacatcacacaacgaagactatacggttgtcgaacagtatgagcgatctgaggggaggcacagcacgggcgggatggatgagctttacaagtga

SEQ ID NO: 49791 - DNA, 44 bp, synthetic construct
  source 1..44: mol_type = other DNA
aaataagagagaaaagaagagtaagaagaaatataagagccacc

SEQ ID NO: 49792 - DNA, 39 bp, synthetic construct
  source 1..39: mol_type = other DNA
atggcccctgctgccaagagagtgaagctggatagcaga

SEQ ID NO: 49793 - DNA, 2937 bp, synthetic construct
  source 1..2937: mol_type = other DNA
caggagatcaagcggattaataaaattcggagaagactggtgaaggattctaacacaaagaaggctggcaagacacggggccctatgaagacactgctggtgagagtgatgacacccgacctgagagaaagactggaaaacctgagaaagaagcctgagaatatcccccagcccatcagcaacacaagccgggccaacctgaataagctgctgaccgactacaccgaaatgaagaaggccatcctgcacgtgtattgggaagagttccagaaagacccagtcggcctgatgagcagagtggctcagcctgccagcaagaagatcgatcagaacaagctgaagcccgaaatggacgagaaggggaacctgacaaccgccggctttgcctgtagccagtgcggccagcccctgtttgtgtacaaactggaacaggtgagcgaaaagggcaaggcttacacgaattacttcggcagatgcaacgtggccgagcacgagaagctgatcaagctggcccagctgaagcctgagaaggatagcgatgaggcagtgacatattccctgggcaagttcggacagcgggccctggatttttattccattcatgtgaccaaggaatccacccaccccgtcaagcctcttgcccaaattgccggcaacagatacgcctccagccccgtgggcaaggccctgagcgacgcctgtatgggcaccatcgccagcttcctgtctaagtaccaggacattatcatcgagcaccagaaggtggtgaagggcaaccagaagagactggagagcctgcgcgagctggccggcaaggaaaacctggagtatcctagcgtgaccctgcctcctcagcctcatacaaaggagggcgtggatgcctacaacgaagtgatcgcccgggtgcggatgtgggtgaacctgaatctgtggcagaagctgaagctgtctagagacgacgccaagcccctgctgagactgaagggcttccccagcttccctctggtggagagacaggcaaatgaagtggactggtgggacatggtgtgtaacgtgaagaagctgatcaatgagaagaaggaggacggcaaagtgttctggcagaatctggccggctacaagcgtcaggaggccctgcggccctacctgagcagcgaggaagacagaaagaagggcaagaagttcgcccggtatcagctgggggacctgctgctgcacctcgagaagaagcacggcgaagactgggggaaggtgtacgatgaggcctgggagcggatcgataagaaggtggagggcctgagcaagcacatcaagctggaggaggaacggagatctgaggacgcccagagcaaggccgccctgaccgactggctgagagccaaggccagcttcgtcatcgaggggctgaaggaggccgacaaggacgagttctgccggtgcgaactgaagctgcagaagtggtacggagatctgagaggcaaacctttcgccatcgaggccgagaacagcatcctggacatcagcggcttcagcaagcagtacaactgcgcctttatttggcagaaggacggagtgaagaagctgaacctgtacctgatcatcaactatttcaagggcggcaagctgagattcaagaagatcaagcctgaagccttcgaggccaacagattctacaccgtgattaacaagaaaagcggagagatcgtgccaatggaagtgaacttcaacttcgacgaccctaacctgatcatcctgcccctggcatttggcaagcggcagggcagagagttcatctggaacgacctgctgtctctggagaccggcagcctgaagctggccaacggcagagtgatcgagaagacactgtacaacagacgaaccagacaagacgagcccgccctgtttgtggccctgaccttcgagagaagagaggtgctggacagcagcaatatcaagcctatgaacctgatcggcgtggaccggggcgagaacatccctgccgtgatcgcccttaccgaccccgagggatgccctctgagccggtttaaagacagcctgggcaaccctacccacatcctgagaattggcgagtcctacaaggagaagcagagaaccatccaggccaagaaggaggtggagcagcggcgggctggcggctactcccggaagtacgccagcaaggccaagaacctggccgacgacatggttagaaataccgccagagacctcctgtactacgctgtgacccaggacgccatgctgatcttcgagaacctgagcagaggcttcggcagacagggcaagagaaccttcatggccgagagacagtacacccggatggaggactggctgaccgccaagctggcctacgagggcctgccctctaagacctacctgtccaagaccttggcacagtacaccagcaagacatgctctaactgcggcttcacaatcacgagcgccgactacgaccgggtgctggagaaactgaagaagaccgccacaggctggatgaccaccattaacggcaaggagctgaaggtggagggccagatcacctactacaacaggtacaaacggcagaacgtggtgaaggacctgagcgtggaactggatagactgagcgaggaaagcgtaaacaatgacatcagcagctggaccaagggccggagcggcgaggccctgagcctgctgaagaagagattctcccacagaccagtgcaggagaagttcgtgtgtctgaactgcggcttcgagacccacgccgacgagcaagccgccctgaacatcgcccggtcttggcttttcctgcggagccaggagtacaagaagtaccagacaaacaagaccacaggcaacacagacaagagagccttcgtcgagacctggcagagcttctacagaaagaagctgaaggaggtgtggaagcctgccgtg

SEQ ID NO: 49794 - DNA, 43 bp, synthetic construct
  source 1..43: mol_type = other DNA
ggaagccccgctgccaagagagtgaagctggactaatagataa

SEQ ID NO: 49795 - DNA, 93 bp, synthetic construct
  source 1..93: mol_type = other DNA
gctgccttctgcggggcttgccttctggccatgcccttcttctctcccttgcacctgtacctcttggtctttgaataaagcctgagtaggaag

SEQ ID NO: 49796 - DNA, 33 bp, synthetic construct
  source 1..33: mol_type = other DNA
atggccccagcggccaaacgggtgaagctggac

SEQ ID NO: 49797 - DNA, 80 bp, synthetic construct
  source 1..80: mol_type = other DNA
aaaaaaaaaaaaaaaaaaaaaaaaaaaaaaaaaaaaaaaaaaaaaaaaaaaaaaaaaaaaaaaaaaaaaaaaaaaaaaaa

SEQ ID NO: 49798 - DNA, 40 bp, synthetic construct
  source 1..40: mol_type = other DNA
actcttctggtccccacagactcagagagaacccgccacc

SEQ ID NO: 49799 - DNA, 111 bp, synthetic construct
  source 1..111: mol_type = other DNA
gctggagcctcggtggccatgcttcttgccccttgggcctccccccagcccctcctccccttcctgcacccgtacccccgtggtctttgaataaagtctgagtgggcggca

SEQ ID NO: 49800 - protein, 57 aa, synthetic construct
QEIKRINKIRRRLVKDSNTKKAGKTRGPMKTLLVRVMTPDLRERLENLRKKPENIPQ

SEQ ID NO: 49801 - protein, 141 aa, synthetic construct
RALDFYSIHVTKESTHPVKPLAQIAGNRYASTPVGKALSDACMGTIASFLSKYQDIIIEHQKVVKGNQKRLESLRELAGKENLEYPSVTLPPQPHTKEGVDAYNEVIARVRMWVNLNLWQKLKLSRDDAKPLLRLKGFPSF

SEQ ID NO: 49802 - protein, 91 aa, synthetic construct
QPASKKIDQNKLKPEMDEKGNLTTAGFACSQCGQPLFVYKLEQVSEKGKAYTNYFGRCNVAEHEKLILLDQLKPEKDSDEAVTYSLGKFGQ

SEQ ID NO: 49803 - protein, 56 aa, synthetic construct
QEGKRINKIRRRLVKDSNTKKAGKTGPMKTLLVRVMTPDLRERLENLRKKPENIPQ

SEQ ID NO: 49804 - protein, 57 aa, synthetic construct
QEIGKRINKIRRRLVKDSNTKKAGKTGPMKTLLVRVMTPDLRERLENLRKKPENIPQ

SEQ ID NO: 49805 - protein, 56 aa, synthetic construct
QEIGRINKIRRRLVKDSNTKKAGKTGPMKTLLVRVMTPDLRERLENLRKKPENIPQ

SEQ ID NO: 49806 - protein, 57 aa, synthetic construct
QEIKGRINKIRRRLVKDSNTKKAGKTGPMKTLLVRVMTPDLRERLENLRKKPENIPQ

SEQ ID NO: 49807 - protein, 56 aa, synthetic construct
QEIKRINGIRRRLVKDSNTKKAGKTGPMKTLLVRVMTPDLRERLENLRKKPENIPQ

SEQ ID NO: 49808 - protein, 56 aa, synthetic construct
QEIKRINKIRRRLVKDSNTKKAGKTGPMKTLLVPVMTPDLRERLENLRKKPENIPQ

SEQ ID NO: 49809 - protein, 44 aa, synthetic construct
PISNTSQANLNKLLTDYTEMKKAILHVYWEEFQKDPVGLMSRVA

SEQ ID NO: 49810 - protein, 91 aa, synthetic construct
QPASKKIDQNKLKPEMDEKGNLTTAGFACSQCGQPLFVYKLEQVSEKGKAYTNYFGRCNVAEHEKLIKLAQLKPEKDSDEAVTYSLGKFGQ

SEQ ID NO: 49811 - protein, 91 aa, synthetic construct
QPASKKIDQNKLKPEMDEKGNLTTAGFACSQCGQPLFVYKLEQVSEKGKAYTNYFGRCNVAEHEKLILLYQLKPEKDSDEAVTYSLGKFGQ

SEQ ID NO: 49812 - protein, 91 aa, synthetic construct
QPASKKIDQNKLKPEMDEKGNLTTAGFACSQCGQPLFVYKLEQVSEKGKAYTNYFGRCNVAEHEKLILLSQLKPEKDSDEAVTYSLGKFGQ

SEQ ID NO: 49813 - protein, 141 aa, synthetic construct
RALDFYSIHVTKESTHPVKPLAQIAGNRYASGPVGKALSDACMGTIASFLSKYQDIIIEHQKVVKGNQKRLESLRELAGKENLEYPSVTLPPQPHTKEGVDAYNEVIARVRTWVNLNLWQKLKLSRDDAKPLLRLKGFPSF

SEQ ID NO: 49814 - protein, 141 aa, synthetic construct
RALDFYSIHVTKESTHPVKPLAQIAGNRYASGPVGKALSDACMGTIASFLSKYQDIIIEHQKVVKGNQKRLESLRELAGKENLEYPSVTLPPQPHTKEGVDAYNEVIARVRWWVNLNLWQKLKLSRDDAKPLLRLKGFPSF

SEQ ID NO: 49815 - protein, 168 aa, synthetic construct
PLVERQANEVDWWDMVCNVKKLINEKKEDGKVFWQNLAGYKRQEALRPYLSSEEDRKKGKKFARTQLGDLLLHLEKKHGEDWGKVYDEAWERIDKKVEGLSKHIKLEEERRSEDAQSKAALTDWLRAKASFVIEGLKEADKDEFCRCELKLQKWYGDLRGKPFAIEAE

SEQ ID NO: 49816 - protein, 168 aa, synthetic construct
PLVERQANEVDWWDMVCNVKKLINEKKEDGKVFWQNLAGYKRQEALRPYLSSEEDRKKGKKFARYQLGDLLLHLEKKHGEDWGKVYDEAWERIDKKVEGLSKHIKLEEERRSEDAQSKAALTDWLRAKASFVIEGLKEADKDEFCRCDLKLQKWYGDLRGKPFAIEAE

SEQ ID NO: 49817 - protein, 110 aa, synthetic construct
SNCGFTITSADYDRVLEKLKKTATGWMTTINGKELKVEGQITYYNRYKRQNVVKDLSVELDRLSEESVNNDISSWDKGRSGEALSLLKKRFSHRPVQEKFVCLNCGFETH

SEQ ID NO: 49818 - protein, 91 aa, synthetic construct
QPASKKIDQNKLKPEMDEKGNLTTAGFACSQCGQPLFVYKLEQVSEKGKAYTNYFGRCNVAEHEKLIQLAQLKPEKDSDEAVTYSLGKFGQ

SEQ ID NO: 49819 - protein, 110 aa, synthetic construct
SNCGFTITSADYDRMLEKLKKTATGWMTTINGKELKVEGQITYYNRYKRQNVVKDLSVELDRLSEESVNNDISSWTKGRSGEALSLLKKRFSHRPVQEKFVCLNCGFETH

SEQ ID NO: 49820 - protein, 110 aa, synthetic construct
SNCGFTITSADYDRVLEKLKKTATGWMTTINGKELKVEGQITYYNRYKRQNVVKDLSVELDRLSEESVNNDISSWTKGRQGEALSLLKKRFSHRPVQEKFVCLNCGFETH

SEQ ID NO: 49821 - protein, 164 aa, synthetic construct
SSNIKPMNLIGVDRGENIPAVIALTDPEGCPLSRFKDSLGNPTHILRIGERYKEKQRTIQAKKEVEQRRAGGYSRKYASKAKNLADDMVRNTARDLLYYAVTQDAMLIFENLSRGFGRQGKRTFMAERQYTRMEDWLTAKLAYEGLPSKTYLSKTLAQYTSKTC

SEQ ID NO: 49822 - protein, 56 aa, synthetic construct
QEGKRINKIRRRLVKDSNTKKAGKTGPMKTLLVPVMTPDLRERLENLRKKPENIPQ

SEQ ID NO: 49823 - protein, 57 aa, synthetic construct
QEIGKRINKIRRRLVKDSNTKKAGKTGPMKTLLVPVMTPDLRERLENLRKKPENIPQ

SEQ ID NO: 49824 - protein, 57 aa, synthetic construct
QEGKRINKIRRRLVKDSNTKKAGKTRGPMKTLLVRVMTPDLRERLENLRKKPENIPQ

SEQ ID NO: 49825 - protein, 56 aa, synthetic construct
QEIKRINGIRRRLVKDSNTKKAGKTGPMKTLLVPVMTPDLRERLENLRKKPENIPQ

SEQ ID NO: 49826 - protein, 58 aa, synthetic construct
QEIGKRINKIRRRLVKDSNTKKAGKTRGPMKTLLVRVMTPDLRERLENLRKKPENIPQ

SEQ ID NO: 49827 - protein, 56 aa, synthetic construct
QEGKRINGIRRRLVKDSNTKKAGKTGPMKTLLVRVMTPDLRERLENLRKKPENIPQ

SEQ ID NO: 49828 - protein, 57 aa, synthetic construct
QEIKRINKIRRRLVKDSNTKKAGKTRGPMKTLLVPVMTPDLRERLENLRKKPENIPQ

SEQ ID NO: 49829 - protein, 57 aa, synthetic construct
QEIKRINGIRRRLVKDSNTKKAGKTRGPMKTLLVRVMTPDLRERLENLRKKPENIPQ

SEQ ID NO: 49830 - protein, 57 aa, synthetic construct
QEIGKRINGIRRRLVKDSNTKKAGKTGPMKTLLVRVMTPDLRERLENLRKKPENIPQ

SEQ ID NO: 49831 - protein, 57 aa, synthetic construct
QEGGKRINKIRRRLVKDSNTKKAGKTGPMKTLLVRVMTPDLRERLENLRKKPENIPQ

SEQ ID NO: 49832 - protein, 57 aa, synthetic construct
QEIGRINKIRRRLVKDSNTKKAGKTRGPMKTLLVRVMTPDLRERLENLRKKPENIPQ

SEQ ID NO: 49833 - protein, 58 aa, synthetic construct
QEIKGRINKIRRRLVKDSNTKKAGKTRGPMKTLLVRVMTPDLRERLENLRKKPENIPQ

SEQ ID NO: 49834 - DNA, 2934 bp, synthetic construct
  source 1..2934: mol_type = other DNA
caagagatcaagagaatcaacaagatcagaaggagactggtcaaggacagcaacacaaagaaggccggcaagacaggccccatgaaaaccctgctcgtcagagtgatgacccctgacctgagagagcggctggaaaacctgagaaagaagcccgagaacatccctcagcctatcagcaacaccagcagggccaacctgaacaagctgctgaccgactacaccgagatgaagaaagccatcctgcacgtgtactgggaagagttccagaaagaccccgtgggcctgatgagcagagttgctcagcctgccagcaagaagatcgaccagaacaagctgaagcccgagatggacgagaagggcaatctgaccacagccggctttgcctgctctcagtgtggccagcctctgttcgtgtacaagctggaacaggtgtccgagaaaggcaaggcctacaccaactacttcggcagatgtaacgtggccgagcacgagaagctgattctgctggcccagctgaaacctgagaaggactctgatgaggccgtgacctacagcctgggcaagtttggacagagagccctggacttctacagcatccacgtgaccaaagaaagcacacaccccgtgaagcccctggctcagatcgccggcaatagatacgcctctggacctgtgggcaaagccctgtccgatgcctgcatgggaacaatcgccagcttcctgagcaagtaccaggacatcatcatcgagcaccagaaggtggtcaagggcaaccagaagagactggaaagcctgagggagctggccggcaaagagaacctggaataccccagcgtgaccctgcctcctcagcctcacacaaaagaaggcgtggacgcctacaacgaagtgatcgccagagtgagaatgtgggtcaacctgaacctgtggcagaagctgaaactgtccagggacgacgccaagcctctgctgagactgaagggcttccctagcttccctctggtggaaagacaggccaatgaagtggattggtgggacatggtctgcaacgtgaagaagctgatcaacgagaagaaagaggatggcaaggttttctggcagaacctggccggctacaagagacaagaagccctgaggccttacctgagcagcgaagaggaccggaagaagggcaagaagttcgccagataccagctgggcgacctgctgctgcacctggaaaagaagcacggcgaggactggggcaaagtgtacgatgaggcctgggagagaatcgacaagaaggtggaaggcctgagcaagcacattaagctggaagaggaaagaaggagcgaggacgcccaatctaaagccgctctgaccgattggctgagagccaaggccagctttgtgatcgagggcctgaaagaggccgacaaggacgagttctgcagatgcgagctgaagctgcagaagtggtacggcgatctgagaggcaagcccttcgccattgaggccgagaacagcatcctggacatcagcggcttcagcaagcagtacaactgcgccttcatttggcagaaagacggcgtcaagaaactgaacctgtacctgatcatcaattacttcaaaggcggcaagctgcggttcaagaagatcaaacccgaggccttcgaggctaacagattctacaccgtgatcaacaaaaagtccggcgagatcgtgcccatggaagtgaacttcaacttcgacgaccccaacctgattatcctgcctctggccttcggcaagagacagggcagagagttcatctggaacgatctgctgagcctggaaaccggctctctgaagctggccaatggcagagtgatcgagaaaaccctgtacaacaggagaaccagacaggacgagcctgctctgtttgtggccctgaccttcgagagaagagaggtgctggacagcagcaacatcaagcccatgaacctgatcggcgtggaccggggcgagaatatccctgctgtgatcgccctgacagaccctgaaggatgcccactgagcagattcaaggactccctgggcaaccctacacacatcctgagaatcggcgagagctacaaagagaagcagaggacaatccaggccaagaaagaggtggaacagagaagagccggcggatactctaggaagtacgccagcaaggccaagaatctggccgacgacatggtccgaaacaccgccagagatctgctgtactacgccgtgacacaggacgccatgctgatcttcgagaatctgagcagaggcttcggccggcagggcaagagaacctttatggccgagaggcagtacaccagaatggaagattggctcacagctaaactggcctacgagggactgcccagcaagacctacctgtccaaaacactggcccagtatacctccaagacctgcagcaattgcggcttcaccatcaccagcgccgactacgacagagtgctggaaaagctcaagaaaaccgccaccggctggatgaccaccatcaacggcaaagagctgaaggttgagggccagatcacctactacaacaggtacaagaggcagaacgtcgtgaaggatctgagcgtggaactggacagactgagcgaagagagcgtgaacaacgacatcagcagctggacaaagggcagatcaggcgaggctctgagcctgctgaagaagaggtttagccacagacctgtgcaagagaagttcgtgtgcctgaactgcggcttcgagacacacgccgatgaacaggctgccctgaacattgccagaagctggctgttcctgagaagccaagagtacaagaagtaccagaccaacaagaccaccggcaacaccgacaagagggcctttgtggaaacctggcagagcttctacagaaaaaagctgaaagaagtctggaagcccgccgtg

SEQ ID NO: 49835 - protein, 91 aa, synthetic construct
QPASKKIDQNKLKPEMDEKGNLTTAGFACSQCGQPLFVYKLEQVSEKGKAYTNYFGRCNVAEHEKLIKLDQLKPEKDSDEAVTYSLGKFGQ

SEQ ID NO: 49836 - protein, 91 aa, synthetic construct
QPASKKIDQNKLKPEMDEKGNLTTAGFACSQCGQPLFVYKLEQVSEKGKAYTNYFGRCNVAEHEKLIKLYQLKPEKDSDEAVTYSLGKFGQ

SEQ ID NO: 49837 - protein, 91 aa, synthetic construct
QPASKKIDQNKLKPEMDEKGNLTTAGFACSQCGQPLFVYKLEQVSEKGKAYTNYFGRCNVAEHEKLIKLSQLKPEKDSDEAVTYSLGKFGQ

SEQ ID NO: 49838 - protein, 91 aa, synthetic construct
QPASKKIDQNKLKPEMDEKGNLTTAGFACSQCGQPLFVYKLEQVSEKGKAYTNYFGRCNVAEHEKLIQLDQLKPEKDSDEAVTYSLGKFGQ

SEQ ID NO: 49839 - protein, 91 aa, synthetic construct
QPASKKIDQNKLKPEMDEKGNLTTAGFACSQCGQPLFVYKLEQVSEKGKAYTNYFGRCNVAEHEKLIQLYQLKPEKDSDEAVTYSLGKFGQ

SEQ ID NO: 49840 - protein, 91 aa, synthetic construct
QPASKKIDQNKLKPEMDEKGNLTTAGFACSQCGQPLFVYKLEQVSEKGKAYTNYFGRCNVAEHEKLIQLSQLKPEKDSDEAVTYSLGKFGQ

SEQ ID NO: 49841 - DNA, 27 bp, synthetic construct
  source 1..27: mol_type = other DNA
ccagccgcgaagcgagtgaaactggac

SEQ ID NO: 49842 - protein, 141 aa, synthetic construct
RALDFYSIHVTKESTHPVKPLAQIAGNRYASTPVGKALSDACMGTIASFLSKYQDIIIEHQKVVKGNQKRLESLRELAGKENLEYPSVTLPPQPHTKEGVDAYNEVIARVRTWVNLNLWQKLKLSRDDAKPLLRLKGFPSF

SEQ ID NO: 49843 - protein, 168 aa, synthetic construct
PLVERQANEVDWWDMVCNVKKLINEKKEDGKVFWQNLAGYKRQEALRPYLSSEEDRKKGKKFARTQLGDLLLHLEKKHGEDWGKVYDEAWERIDKKVEGLSKHIKLEEERRSEDAQSKAALTDWLRAKASFVIEGLKEADKDEFCRCDLKLQKWYGDLRGKPFAIEAE

SEQ ID NO: 49844 - protein, 110 aa, synthetic construct
SNCGFTITSADYDRVLEKLKKTATGWMTTINGKELKVEGQITYYNRYKRQNVVKDLSVELDRLSEESVNNDISSWDKGRQGEALSLLKKRFSHRPVQEKFVCLNCGFETH

SEQ ID NO: 49845 - protein, 110 aa, synthetic construct
SNCGFTITSADYDRMLEKLKKTATGWMTTINGKELKVEGQITYYNRYKRQNVVKDLSVELDRLSEESVNNDISSWDKGRSGEALSLLKKRFSHRPVQEKFVCLNCGFETH

SEQ ID NO: 49846 - protein, 110 aa, synthetic construct
SNCGFTITSADYDRMLEKLKKTATGWMTTINGKELKVEGQITYYNRYKRQNVVKDLSVELDRLSEESVNNDISSWTKGRQGEALSLLKKRFSHRPVQEKFVCLNCGFETH

SEQ ID NO: 49847 - protein, 141 aa, synthetic construct
RALDFYSIHVTKESTHPVKPLAQIAGNRYASGPVGKALSDACMGTIASFLSKYQDIIIEHQKVVKGNQKRLESLRELAGKENLEYPSVTLPPQPHTKEGVDAYNEVIARVRMWVNLNLWQKLKLSRDDAKPLLRLKKFPSF

SEQ ID NO: 49848 - DNA, 30 bp, synthetic construct
  source 1..30: mol_type = other DNA
gaattcctagagctcgctgatcagcctcga

SEQ ID NO: 49849 - DNA, 20 bp, synthetic construct
  source 1..20: mol_type = other DNA
ggccgagatgtctcgctccg

SEQ ID NO: 49850 - DNA, 3006 bp, synthetic construct
  source 1..3006: mol_type = other DNA
atggctccagctgccaagagagtgaagctggactctagacaagagatcaagaggatcaacaagattagaagaaggctggtcaaggacagcaacaccaagaaggcaggcaagacaggccccatgaaaaccctgcttgtcagagtgatgacccctgacctgagagagagactggaaaacctgagaaagaagcctgagaacatccctcagcctatctccaacaccagcagagccaacctgaacaagctgctgacagactacacagagatgaagaaagccatcctgcatgtgtactgggaagagttccagaaagaccctgtgggcctgatgagcagagtggcccagcctgccagcaagaagattgaccagaacaaactgaagccagagatggatgagaagggcaacctgaccacagctggctttgcctgctctcagtgtggccagcctctgtttgtgtacaagctggaacaagtgtctgagaaaggcaaggcctacaccaactactttggcagatgcaatgtggctgagcatgagaagctgatcctgctggcccagctgaagcctgaaaaggactctgatgaggctgtgacctacagcctgggcaagtttggacagagagccctggacttctacagcatccatgtgaccaaagaaagcacacaccctgtgaagcccctggctcagattgctggcaacagatatgcctctggacctgtgggcaaagccctgtctgatgcctgcatgggaaccattgccagctttctgagcaagtaccaggacatcatcattgagcaccagaaagtggtcaaggggaaccagaagaggctggaatctctgagagagctggctggcaaagagaacctggaatacccctctgtgaccctgcctcctcagcctcacaccaaagagggtgttgatgcctacaatgaagtgattgccagagtcaggatgtgggtcaacctgaatctgtggcagaagctgaagctgagcagggatgatgccaagcctctgctgagactgaagggcttccctagcttcccactggtggaaaggcaggctaatgaagtggattggtgggacatggtctgcaatgtgaagaaactgatcaatgagaagaaagaggatggcaaggttttctggcagaacctggctggctacaagaggcaagaagccctgaggccttacctgtcctctgaggaagataggaagaaggggaagaagtttgccagataccagctgggagatctgctgctgcacctggaaaagaaacatggggaagattggggcaaagtgtatgatgaggcctgggagagaattgacaagaaggtggaaggcctgagcaagcacattaagctggaagaggaaagaagatctgaggatgcccagagcaaggctgccctgactgattggctgagagccaaggccagctttgtgattgagggcctgaaagaggctgacaaggatgagttctgtagatgtgaactgaagctgcaaaagtggtatggggacctgaggggcaagccctttgccattgaggcagagaacagcatcctggacatcagtggcttcagcaagcagtacaactgtgccttcatttggcagaaggatggggttaagaagctcaacctgtacctgatcatcaactacttcaaaggtggcaagctgaggttcaagaagatcaagccagaggcctttgaggccaacaggttctacacagtgatcaacaaaaagtctggggagattgtgcctatggaagtgaacttcaactttgatgatcccaacctcatcatcctgccactggcctttggcaagagacagggcagagaattcatctggaatgacctgctgagcctggaaacaggcagcctgaaactggccaatggcagagtgattgagaaaaccctgtacaacagaaggaccagacaggatgagcctgcactgtttgtggccctgacctttgagagaagggaagtgctggatagcagcaacatcaagcccatgaacctgattggagtggacagaggggagaatatccctgctgtcattgccctgacagaccctgagggctgtcccctgagcagattcaaggactccctgggcaaccccacacacattctgagaattggggagagctacaaagagaagcagagaaccatccaggccaagaaagaagtggaacagaggagagctggaggctactctaggaagtatgccagcaaagccaagaatctggctgatgacatggtcagaaacacagccagggacctgctgtactatgctgtgacccaggatgccatgctgatctttgagaatctgagcagaggatttgggagacaaggcaagaggaccttcatggctgaaagacagtacaccaggatggaagattggctgactgccaaactggcctatgagggactgcccagcaagacctacctgtccaagacactggcccagtatacctccaagacctgcagcaattgtggcttcaccatcacctctgcagactatgacagagtgctggaaaagctcaagaaaacagccacaggctggatgaccaccatcaatgggaaagagctgaaggttgagggccagatcacctactacaacagatacaaaaggcagaatgtggttaaggacctgtctgtggaactggacagactgtctgaggaatctgtgaacaatgacatcagcagctggaccaagggcagatctggggaagctctgagcctgctgaagaagagattcagccacagacctgtgcaagagaagtttgtgtgtctgaactgtggctttgagacacatgctgatgaacaggctgctctgaacattgccagaagctggctgttcctgagaagccaagagtacaagaagtaccagaccaacaagaccacaggcaacactgacaagagggcctttgtggaaacctggcagagcttctacagaaagaaactcaaagaagtctggaagcctgctgtgggatcccctgcagctaaaagggtcaagctggac

SEQ ID NO: 49851 - DNA, 3006 bp, synthetic construct
  source 1..3006: mol_type = other DNA
atggcccctgcagcaaaaagagtgaaactggactccagacaagagatcaagagaatcaacaagatcaggagaagactggtgaaagacagcaacaccaagaaagcaggcaagacaggtcctatgaagaccctgctggtgagagtgatgacccctgatctgagagaaagactggaaaacctgagaaagaagccagagaacattccccagcctatctctaataccagcagagccaatctgaacaaactgctgacagactacacagagatgaaaaaggccatcctgcatgtgtactgggaggaattccagaaggatccagtgggccttatgagcagagtggcccagcctgctagcaagaaaatagaccagaacaagctgaagcctgagatggatgagaagggcaacctgaccacagctggatttgcctgcagccagtgtggccagcccctgtttgtgtacaagctggaacaggtgagtgagaagggcaaggcttacacaaactactttggcagatgcaatgtggctgagcatgagaaactgatcctgctggctcagctgaaacctgagaaagactctgatgaggcagtgacctacagcctgggcaagtttggccaaagagccctggacttctacagcatccatgtgaccaaggagagcacccacccagtgaagcctctggcccaaattgctggcaatagatatgcctcaggccctgttggaaaggccctgtcagatgcttgcatgggcacaattgctagcttcctgtccaagtaccaggacatcatcattgagcaccagaaggttgtgaaggggaaccagaaaagactggagtcactgagagagctggcaggcaaagaaaacctggagtacccatcagtgacactgccacctcagccccacaccaaggaaggagttgatgcatacaatgaggtgattgccagagtgagaatgtgggtgaacctcaacctgtggcagaagctaaaactgagcagagatgatgccaagccactgctgagactgaagggctttcctagcttccctctggtggagagacaggccaatgaagtggactggtgggacatggtctgcaatgtgaagaagttgatcaatgagaagaaggaggatggcaaggttttctggcaaaacttggcaggctataagagacaggaagctctgagaccttacctgagcagtgaggaggacagaaagaagggaaagaagtttgccagataccaactgggtgacctgctgctgcatctggaaaagaagcatggggaagattggggcaaggtgtatgatgaggcctgggaaaggattgacaaaaaggttgaaggcctgtccaaacatatcaagctggaagaggagagaagatctgaggatgcccagagcaaggctgccctgacagactggctgagagccaaggcctcttttgtgatagagggcctgaaggaagctgataaggatgagttctgcagatgtgagctgaagctccagaaatggtatggtgatctgagaggcaagccttttgccatagaggctgagaatagcatcttggacatctctggatttagcaagcagtacaactgtgcctttatctggcaaaaagatggagtgaagaaactcaacctgtacctgatcataaactactttaaaggtggcaagctgagatttaagaagatcaagcctgaagcctttgaggccaatagattctacacagtgattaacaagaaaagtggggagattgtgcccatggaagtgaacttcaactttgatgaccccaacctcattatccttcctctggcctttggcaagagacagggaagagagttcatctggaatgacctactgagcctggagacaggcagcctgaaacttgccaatggcagagtgattgaaaagaccctgtacaacagaagaacaagacaggatgagcctgcactgtttgtggccctgacatttgagagaagagaagtcctggattcttctaacatcaagcctatgaacctgataggtgtggataggggtgaaaacatccctgctgtgatagcactgacagaccctgagggctgccctctgtctagattcaaggacagcctgggaaaccccacccacatcctgagaattggagagagctacaaagagaagcagagaaccattcaggccaagaaggaggttgagcagagaagagctggtggctacagcagaaagtatgccagcaaggccaagaacctggcagatgacatggtgagaaacacagctagagatctgctgtactatgcagtgacccaggatgctatgctgatctttgagaatctgtctagaggctttggcagacagggcaagagaacctttatggcagaaagacagtatacaagaatggaagattggctgacagccaagctggcttatgagggcctgccaagcaagacctacctgtctaagaccctggcccagtacacctccaagacctgtagcaactgtggcttcaccatcacctctgcagactatgacagagtgctggaaaagctcaagaagactgccacaggctggatgaccactatcaatggcaaggaactgaaagtggaagggcagatcacatattacaacagatataagagacagaatgtggtgaaggacctgtcagtggaactggatagactgtctgaggaaagtgtcaacaatgacatcagctcttggaccaagggcagatctggagaggccctcagcctgctgaagaagagattcagccacagacctgtgcaggaaaaatttgtgtgtctgaactgtggctttgagacacatgctgatgagcaggcagctctgaatatagccagatcctggctgtttctgagaagccaagagtacaaaaaataccagaccaacaagaccacaggaaacacagacaagagagcctttgtggaaacctggcagagcttctacagaaagaagctgaaggaagtgtggaaacctgctgtgggatctcctgcagccaagagagtgaagctggac

SEQ ID NO: 49852 - DNA, 3006 bp, synthetic construct
  source 1..3006: mol_type = other DNA
atggccccagcagccaagagagtgaagctggacagcagacaagagatcaagaggatcaacaagatcagaagaaggctggtgaaggacagcaacaccaagaaggctggcaagacaggccccatgaaaaccctgctggtgagagtgatgaccccagacctgagagagagactggagaacctgagaaagaagccagagaacatcccccagcctatcagcaacaccagcagagccaacctgaacaagctgctgacagactacacagagatgaagaaggccatcctgcatgtgtactgggaggagttccaaaaagaccctgtgggcctgatgagcagagtggcccagcctgctagcaagaagattgaccagaacaagctgaagcctgagatggatgagaagggcaatctgaccacagctggatttgcctgtagccagtgtggccagcctctgtttgtgtacaagctggagcaagtgtcagagaagggcaaggcctacaccaactactttggcagatgcaatgtggctgagcatgagaagctgatcctgctggcccagctgaagcctgaaaaggacagtgatgaggctgtgacctacagcctgggcaagtttggacagagagccctggacttctacagcatccatgtgaccaaggagagcacacaccctgtgaaacccctggctcagatagctggcaacagatatgctagtggacctgtgggcaaagccctgtcagatgcctgcatgggaacaattgctagcttcctgagcaagtaccaggacatcatcatagagcaccagaaggtggtgaagggcaaccagaagaggctggaaagcctgagagagctggctggcaaggagaatctggaatacccttcagtgaccctgcctcctcagcctcataccaaagagggagtggatgcctacaatgaggtgattgccagagtgaggatgtgggtgaacctgaacctgtggcagaagctgaagctgagcagggatgatgccaagcctctgctgagactgaagggcttccctagcttccctctggtggaaaggcaggccaatgaagtggattggtgggacatggtgtgcaatgtgaagaagctgatcaatgagaagaaggaggatggcaaggtgttctggcagaacctggctggctataagaggcaagaagccctgaggccttacctgagcagtgaggaggacaggaagaagggcaagaagtttgccagataccagctgggagatctgctgctgcacctggagaagaagcatggtgaagattggggcaaggtgtatgatgaggcctgggagagaatagacaagaaggtggagggcctgagcaagcacatcaagctggaggaggagagaagaagtgaggatgcccaaagcaaggctgccctgacagattggctgagagccaaggccagctttgtgattgagggcctgaaagaggctgacaaggatgagttctgcagatgtgagctgaagctgcaaaagtggtatggagacctgaggggcaagccctttgccattgaggctgagaacagcatcctggacatctctggcttcagcaagcagtacaactgtgccttcatctggcagaaggatggagtgaagaagctgaacctgtacctgatcatcaactacttcaagggtggcaagctgaggttcaagaagatcaagcctgaggcctttgaggccaacaggttctacacagtgatcaacaagaagtcaggggagattgtgcccatggaggtgaacttcaactttgatgaccccaacctgatcatcctgcctctggcctttggcaagagacagggcagagagttcatctggaatgacctgctgagcctggaaacaggcagcctgaaactggccaatggcagagtgattgagaagaccctgtacaacagaaggaccagacaggatgagcctgctctgtttgtggccctgacctttgagagaagggaagtgctggacagcagcaacatcaagcccatgaacctgattggggtggacagaggggagaacatccctgctgtgattgccctgacagatcctgagggctgtcctctgagcagattcaaggacagcctgggaaaccccacccacatcctgagaattggagagagctacaaggagaagcagagaaccatccaggccaagaaggaggtggaacagaggagagctggaggctacagcaggaagtatgccagcaaggccaagaacctggctgatgacatggtgagaaacacagccagggacctgctgtactatgctgtgacccaggatgccatgctgatctttgagaacctgagcagaggctttggcagacagggcaagaggaccttcatggctgagagacagtacaccaggatggaggattggctgacagccaaactggcctatgagggactgcccagcaagacctacctgagcaagacactggctcagtacaccagcaagacctgcagcaactgtggcttcaccatcacctcagctgactatgacagagtgctggagaagctgaagaagacagccacaggctggatgaccaccatcaatggcaaagagctgaaggtggagggccagatcacctactacaacagatacaagaggcagaatgtggtgaaggacctgagtgtggaactggacagactgtcagaggaatcagtgaacaatgacatcagcagctggacaaagggcagatcaggggaagctctgagcctgctgaagaagagattcagccacagaccagtgcaggagaagtttgtgtgcctgaactgtggctttgagacccatgcagatgaacaggctgctctgaacatagccagaagctggctgttcctgagaagccaggagtacaagaagtaccagaccaacaagaccactggcaacactgacaagagggcctttgtggaaacctggcagagcttctacagaaagaagctgaaggaggtgtggaagcctgctgtgggaagccctgctgctaaaagggtgaagctggac

SEQ ID NO: 49853 - DNA, 3006 bp, synthetic construct
  source 1..3006: mol_type = other DNA
atggccccagcagccaagagagtgaagctggacagcagacaggagatcaagagaatcaacaagatcagaagaagactggtgaaggacagcaacaccaagaaggcaggcaagacaggccccatgaagaccctgctggtgagagtgatgacccctgacctgagagagagactggagaacctgagaaagaagccagagaacatcccccagcccatcagcaacaccagcagagccaacctgaacaagctgctgactgactacacagagatgaagaaggccatcctgcatgtgtactgggaggagttccagaaggacccagtgggcctgatgagcagagtggcccagccagccagcaagaagatagaccagaacaagctgaagccagagatggatgagaagggcaacctgaccacagcaggctttgcctgcagccagtgtggccagcccctgtttgtgtacaagctggagcaggtgtcagagaagggcaaggcctacaccaactactttggcagatgcaatgtggcagagcatgagaagctgatcctgctggcccagctgaagccagagaaggactctgatgaggcagtgacctacagcctgggcaagtttggccagagagccctggacttctacagcatccatgtgaccaaggagagcacccacccagtgaagcccctggcccagatagcaggcaacagatatgccagtggcccagtgggcaaggccctgtctgatgcctgcatgggcaccattgccagcttcctgagcaagtaccaggacatcatcatagagcaccagaaggtggtgaagggcaaccagaagagactggagagcctgagagagctggcaggcaaggagaacctggagtaccccagtgtgaccctgcccccccagccccacaccaaggagggggtggatgcctacaatgaggtgattgccagagtgagaatgtgggtgaacctgaacctgtggcagaagctgaagctgagcagagatgatgccaagcccctgctgagactgaagggcttccccagcttccccctggtggagagacaggccaatgaggtggactggtgggacatggtgtgcaatgtgaagaagctgatcaatgagaagaaggaggatggcaaggtgttctggcagaacctggcaggctacaagagacaggaggccctgagaccctacctgagcagtgaggaggacagaaagaagggcaagaagtttgccagataccagctgggggacctgctgctgcacctggagaagaagcatggggaggactggggcaaggtgtatgatgaggcctgggagagaattgacaagaaggtggagggcctgagcaagcacatcaagctggaggaggagagaagaagtgaggatgcccagagcaaggcagccctgactgactggctgagagccaaggccagctttgtgatagagggcctgaaggaggctgacaaggatgagttctgcagatgtgagctgaagctgcagaagtggtatggggacctgagaggcaagccctttgccattgaggctgagaacagcatcctggacatctcaggcttcagcaagcagtacaactgtgccttcatctggcagaaggatggggtgaagaagctgaacctgtacctgatcatcaactacttcaagggaggcaagctgagattcaagaagatcaagccagaggcctttgaggccaacagattctacactgtgatcaacaagaagtctggtgagatagtgcccatggaggtgaacttcaactttgatgaccccaacctgatcatcctgcccctggcctttggcaagagacagggcagagagttcatctggaatgacctgctgagcctggagacaggcagcctgaagctggccaatggcagagtgattgagaagaccctgtacaacagaagaaccagacaggatgagccagccctgtttgtggccctgacctttgagagaagagaggtgctggacagcagcaacatcaagcccatgaacctgataggagtggacagaggtgagaacatccctgcagtgatagccctgacagaccctgagggctgccccctgagcagattcaaggacagcctgggcaaccccacccacatcctgagaattggggagagctacaaggagaagcagagaaccatccaggccaagaaggaggtggagcagagaagagcagggggctacagcagaaagtatgccagcaaggccaagaacctggcagatgacatggtgagaaacacagccagagacctgctgtactatgcagtgacccaggatgccatgctgatctttgagaacctgagcagaggctttggcagacagggcaagagaaccttcatggcagagagacagtacaccagaatggaggactggctgacagccaagctggcctatgagggcctgcccagcaagacctacctgagcaagaccctggcccagtacaccagcaagacctgcagcaactgtggcttcaccatcacctcagctgactatgacagagtgctggagaagctgaagaagactgccactggctggatgaccaccatcaatggcaaggagctgaaggtggagggccagatcacctactacaacagatacaagagacagaatgtggtgaaggacctgagtgtggagctggacagactgtctgaggagtctgtgaacaatgacatcagcagctggaccaagggcagatctggagaggccctgagcctgctgaagaagagattcagccacagaccagtgcaggagaagtttgtgtgcctgaactgtggctttgagacccatgcagatgagcaggcagccctgaacatagccagaagctggctgttcctgagaagccaggagtacaagaagtaccagaccaacaagaccacaggcaacacagacaagagagcctttgtggagacctggcagagcttctacagaaagaagctgaaggaggtgtggaagccagcagtgggcagccctgcagccaagagagtgaagctggac

SEQ ID NO: 49854 - DNA, 3006 bp, synthetic construct
  source 1..3006: mol_type = other DNA
atggccccagctgccaagagagtgaagctggacagcagacaggagatcaagaggatcaacaagatcagaagaaggctggtgaaggacagcaacaccaagaaggcaggcaagactggccccatgaagaccctgctggtgagagtgatgaccccagacctgagagagagactggagaacctgagaaagaagccagagaacatcccccagcccatcagcaacaccagcagagccaacctgaacaagctgctgacagactacactgagatgaagaaggccatcctgcatgtgtactgggaggagttccagaaggacccagtgggcctgatgagcagagtggcccagcctgccagcaagaagatagaccagaacaagctgaagccagagatggatgagaagggcaacctgaccacagctggctttgcctgcagccagtgtggccagcccctgtttgtgtacaagctggagcaggtgtcagagaagggcaaggcctacaccaactactttggcagatgcaatgtggcagagcatgagaagctgatcctgctggcccagctgaagccagagaaggacagtgatgaggcagtgacctacagcctgggcaagtttggccagagagccctggacttctacagcatccatgtgaccaaggagagcacccacccagtgaagcccctggcccagattgcaggcaacagatatgcctcaggcccagtgggcaaggccctgtctgatgcctgcatgggcaccatagccagcttcctgagcaagtaccaggacatcatcatagagcaccagaaggtggtgaagggcaaccagaagaggctggagagcctgagagagctggctggcaaggagaacctggagtacccctcagtgaccctgcccccccagccccacaccaaggagggtgtggatgcctacaatgaggtgattgccagagtgaggatgtgggtgaacctgaacctgtggcagaagctgaagctgagcagggatgatgccaagcccctgctgagactgaagggcttccccagcttccccctggtggagaggcaggccaatgaggtggactggtgggacatggtgtgcaatgtgaagaagctgatcaatgagaagaaggaggatggcaaggtgttctggcagaacctggcaggctacaagaggcaggaggccctgaggccctacctgagcagtgaggaggacaggaagaagggcaagaagtttgccagataccagctgggagacctgctgctgcacctggagaagaagcatggggaggactggggcaaggtgtatgatgaggcctgggagagaatagacaagaaggtggagggcctgagcaagcacatcaagctggaggaggagagaagatcagaggatgcccagagcaaggcagccctgacagactggctgagagccaaggccagctttgtgattgagggcctgaaggaggcagacaaggatgagttctgcagatgtgagctgaagctgcagaagtggtatggagacctgaggggcaagccctttgccattgaggcagagaacagcatcctggacatctcaggcttcagcaagcagtacaactgtgccttcatctggcagaaggatggagtgaagaagctgaacctgtacctgatcatcaactacttcaagggtggcaagctgaggttcaagaagatcaagcctgaggcctttgaggccaacaggttctacactgtgatcaacaagaagtctggtgagatagtgcccatggaggtgaacttcaactttgatgaccccaacctgatcatcctgcccctggcctttggcaagagacagggcagagagttcatctggaatgacctgctgagcctggagacaggcagcctgaagctggccaatggcagagtgattgagaagaccctgtacaacagaaggaccagacaggatgagcctgccctgtttgtggccctgacctttgagagaagggaggtgctggacagcagcaacatcaagcccatgaacctgataggggtggacagaggagagaacatcccagcagtgatagccctgacagacccagagggctgccccctgagcagattcaaggacagcctgggcaaccccacccacatcctgagaattggggagagctacaaggagaagcagagaaccatccaggccaagaaggaggtggagcagaggagagctggaggctacagcaggaagtatgccagcaaggccaagaacctggctgatgacatggtgagaaacacagccagggacctgctgtactatgctgtgacccaggatgccatgctgatctttgagaacctgagcagaggctttggcagacagggcaagaggaccttcatggctgagagacagtacaccaggatggaggactggctgacagccaagctggcctatgagggcctgcccagcaagacctacctgagcaagaccctggcccagtacaccagcaagacctgcagcaactgtggcttcaccatcacctctgcagactatgacagagtgctggagaagctgaagaagactgccactggctggatgaccaccatcaatggcaaggagctgaaggtggagggccagatcacctactacaacagatacaagaggcagaatgtggtgaaggacctgtctgtggagctggacagactgtctgaggagagtgtgaacaatgacatcagcagctggaccaagggcagaagtggggaggccctgagcctgctgaagaagagattcagccacagaccagtgcaggagaagtttgtgtgcctgaactgtggctttgagacccatgctgatgagcaggcagccctgaacatagccagaagctggctgttcctgagaagccaggagtacaagaagtaccagaccaacaagaccacaggcaacactgacaagagggcctttgtggagacctggcagagcttctacagaaagaagctgaaggaggtgtggaagccagcagtgggcagcccagcagccaagagggtgaagctggac

SEQ ID NO: 49855 - DNA, 3006 bp, synthetic construct
  source 1..3006: mol_type = other DNA
atggctccagctgctaagagagtgaaactggactccaggcaggaaattaaaagaatcaacaagatcaggagaaggctggtcaaagatagcaacaccaagaaggcagggaagacaggccctatgaaaaccctgctggtgagagtgatgacacctgatctgagagaaagactggagaatctgagaaagaagccagagaatatcccccagcctatctctaacacatccagagccaacctgaataagctgctgactgattacactgagatgaagaaagcaattctgcatgtgtactgggaggaattccagaaagatccagtgggcctgatgtctagagtggcccagcctgctagtaaaaagattgatcagaacaagctcaagcctgagatggatgagaaggggaacctgaccacagcaggatttgcctgcagccagtgtggccagcccctgtttgtgtacaagctggaacaggtgtcagaaaaaggcaaggcctacactaattactttggtagatgcaatgtggctgagcatgagaagctgatcctgctggcccagctgaagcctgagaaggattcagatgaggcagtgacctattccctgggcaagtttggacagagggccctggatttttatagcatccatgtcaccaaggagagcactcatccagtgaagccactggcccagatagcaggaaacagatatgcttctggaccagttggcaaggcactgtcagatgcctgcatgggcacaatagccagcttcctgtccaagtaccaggacatcattattgagcaccagaaggtggtcaagggaaatcagaagaggctggagtccctcagagaactggctggtaaagagaacctggaatatcctagtgtgactctgcccccacagccccacaccaaggagggggtggatgcctataatgaggtcatagctagagtgagaatgtgggtgaatctgaatctgtggcagaagctcaagctgtcaagagatgatgccaagcctctcctgagactgaaggggttcccaagcttcccactggtggaaagacaggccaatgaggtggattggtgggacatggtctgcaatgtgaagaagctgatcaatgaaaagaaggaggatggcaaagtgttttggcagaacctggctggctacaagaggcaggaggccctgaggccctacctttcctcagaggaggatagaaagaagggcaagaagtttgccagataccagctgggtgatctgctgctgcacctggagaagaagcatggggaagactggggaaaggtgtatgatgaggcctgggagagaattgacaagaaagtggaggggctgagcaagcacatcaaactggaggaagaaagaagaagtgaagatgctcagtctaaagcagccctgacagactggctgagagccaaagccagctttgtcatagaaggcctgaaggaggctgacaaggatgagttctgcagatgtgagctgaaactgcagaagtggtatggggacctgagaggcaagccctttgccatagaggcagaaaactccatcctggatatcagtgggttctccaagcagtacaattgtgccttcatctggcagaaggatggagtgaagaaactgaatctgtatctgatcatcaattactttaaaggggggaaactgagattcaagaagatcaaaccagaggcctttgaggccaatagattctatacagtgatcaacaagaaatctggagagattgtgccaatggaggtgaattttaactttgatgaccccaacctgatcatcctgcctctggcctttggcaaaagacagggcagggagtttatctggaatgatctgctgtcactggaaacagggagcctgaagctggccaatgggagagtgattgaaaagacactgtataacagaagaactagacaggatgagccagctctgtttgtggccctgacctttgagagaagagaggtgttggattcatctaacataaaacccatgaacctgattggggtggacagaggggagaacattccagctgtgattgccctgactgacccagagggctgccctctgagcagattcaaggatagcctgggcaatcccactcatattctgagaattggggaaagctataaagaaaagcaaagaactatccaggctaagaaggaagtggagcagaggagagcaggaggctacagcagaaagtatgcctccaaggctaagaatctggcagatgacatggtgaggaacactgctagagacctgctgtactatgcagtgacccaggatgccatgctgatctttgagaacctcagcagaggctttgggagacagggcaagagaaccttcatggcagagagacagtataccagaatggaggattggctgacagccaagctggcctatgagggcttgcccagtaaaacctacctgagcaaaaccctggcacagtacaccagcaagacatgttcaaactgtggattcaccatcacctctgcagactatgatagggtgctggagaagctcaaaaagactgccacaggctggatgacaaccatcaatggaaaggagctgaaggtggaaggccagatcacatattataacagatataagaggcagaatgtggtgaaggacctgtctgtggagctggacagactgtcagaggaatctgtgaataatgacatcagctcttggaccaaagggagatctggagaagccctgtccctgctgaaaaaaagattctctcacagacctgtgcaggaaaagtttgtgtgcctgaattgtggctttgagacccatgcagatgagcaggctgccctgaatatagccagatcctggctgtttctgagatcccaggagtataagaagtaccagaccaacaagacaacaggcaatactgacaagagagcctttgtggagacatggcagagcttttacagaaagaagctgaaggaggtgtggaagcctgcagtggggagccctgctgccaagagagtcaagctggac

SEQ ID NO: 49856 - DNA, 3006 bp, synthetic construct
  source 1..3006: mol_type = other DNA
atggcccctgctgccaaaagagtgaagctggattctagacaagagatcaagaggatcaacaagatcaggagaaggctggtgaaggatagcaacaccaaaaaagctggcaaaacaggacccatgaaaacactgcttgttagggtgatgacacctgatcttagggagagactggagaaccttaggaaaaaacctgagaacatccctcagcctatcagcaatacaagcagagccaatctgaacaagctgctgactgactacacagagatgaagaaagccattctgcatgtgtactgggaggagttccaaaaagaccctgtgggattgatgtctagagttgctcagcctgctagcaagaagattgaccagaacaagctgaagcctgagatggatgagaaaggaaatttaacaacagctggctttgcctgctctcagtgtggccaacctctgtttgtttataagctggagcaagtgtcagagaaaggcaaggcctacaccaattactttggaagatgcaatgtggctgagcatgagaaacttattctgctggcccaactgaaacctgagaaggactctgatgaagctgtgacatatagcttgggaaagtttggccagagggccttggacttttacagcatccatgttaccaaggaatctacacaccctgtgaagcccttagctcagattgctggaaataggtatgcttctggacctgtgggaaaagctctttctgatgcctgtatgggaacaattgccagcttcttgagcaagtaccaggacatcatcatagaacaccagaaggtggtgaaaggaaaccagaagaggctggaatctttaagggagcttgctggcaaagaaaacctggagtatccttctgttacacttccccctcaacctcataccaaagagggagttgatgcctacaatgaagtgattgccagagtgagaatgtgggtgaacctgaacttgtggcaaaagctgaagcttagcagagatgatgccaagcccttactgagacttaagggcttccctagctttcctttagtggaaaggcaagctaatgaagtggattggtgggacatggtgtgcaatgtgaagaagctgatcaatgagaagaaggaggatggaaaggtgttctggcagaatttggctggatacaaaaggcaagaagctctgaggccttacttgagctctgaagaggacagaaagaagggcaagaagtttgccagataccagcttggagatcttctgttacacctggaaaagaaacatggagaagattggggcaaagtgtatgatgaggcctgggagagaattgacaaaaaggtggaaggccttagcaagcacatcaaacttgaggaagagagaagatcagaggatgctcaatctaaagctgctctgacagattggctgagagctaaggcctcttttgtgattgaaggcttgaaagaggctgacaaggatgagttctgtaggtgtgaacttaaactgcagaagtggtatggagatctgaggggaaaaccctttgccattgaagctgagaactctatcctggacatctctggcttcagcaagcaatacaactgtgccttcatttggcagaaggatggggttaagaagctgaacctgtacctgatcatcaactacttcaaaggaggcaagctgaggttcaagaagatcaaacctgaggcttttgaggccaacaggttctacacagtgatcaacaaaaagtctggtgagattgtgcccatggaggtgaacttcaattttgatgatcccaatctgattatccttcctttggcctttggcaagagacagggcagagaattcatctggaatgacctgcttagcttagaaacaggaagcctgaaactggccaatggcagagtgattgagaaaaccctgtacaacagaaggaccagacaagatgaacctgctctgtttgtggctctgacctttgagagaagggaggttttggatagcagcaacatcaagcccatgaatctgattggagtggatagaggtgaaaatattcctgctgtgattgctctgacagatcctgaaggctgtcccttaagcagattcaaagattctcttggcaaccccacacacattctgagaattggagagagctacaaagagaagcagagaaccattcaggctaagaaagaagtggaacagaggagagctggaggatactctaggaagtatgcctctaaagccaagaatttggctgatgatatggtgagaaatacagccagggacctgctgtattatgctgttacacaggatgctatgctgatctttgagaacctgagcagaggatttggcagacaaggaaagaggacctttatggctgagagacagtacaccaggatggaagattggttaacagccaagttagcttatgagggactgcctagcaagacctaccttagcaaaacactggctcagtataccagcaagacctgcagcaactgtggattcaccattacctctgctgactatgacagagtgctggaaaagctgaaaaaaacagccacaggctggatgaccacaatcaatggcaaagagcttaaagttgagggccagatcacctactacaacagatacaagaggcagaatgtggttaaggatctgtctgtggaacttgacagactgtctgaggagtctgtgaacaatgacattagcagctggacaaagggaagatctggtgaagctctgtctctgttgaaaaagagattcagccacagacctgtgcaggaaaagtttgtgtgtctgaactgtggctttgagacacatgctgatgaacaagctgctctgaatattgccagatcttggctgttcctgagaagccaggagtacaagaagtaccaaaccaacaagaccacaggcaacacagacaaaagggcttttgtggaaacatggcagagcttctacaggaagaaactgaaagaagtttggaagcctgctgtgggatctcctgctgctaaaagagtgaagttggac

SEQ ID NO: 49857 - DNA, 3006 bp, synthetic construct
  source 1..3006: mol_type = other DNA
atggccccagctgccaagagagtgaaactggactcaagacaagagatcaagagaatcaacaagatcagaagaagactggtgaaggacagcaacaccaagaaggctggcaagacaggccccatgaagaccctgctggtgagagtgatgaccccagacctgagagagagactggaaaacctgagaaagaagccagagaatattcctcagcccatcagcaacacaagcagagccaacctgaacaagctgctgacagactacactgagatgaagaaggccatcctgcatgtgtactgggaggagtttcagaaggacccagtgggcctgatgagcagagtggctcagccagctagcaagaagatagatcagaacaagctgaaaccagaaatggatgagaaaggcaacctaaccactgcaggctttgcctgctctcagtgtgggcagcccctgtttgtgtacaagctggagcaagtgagtgagaagggtaaggcctacaccaactactttggcagatgcaatgtggcagagcatgagaagctgatcctgctggcccaactgaagccagaaaaagattctgatgaggcagtgacctacagtctgggcaagtttgggcagagagccctggacttctacagcatccatgtgaccaaggagagcacccaccctgtgaagcccctggctcagattgcaggcaacagatatgcttcaggccctgtgggcaaggccctgtctgatgcctgcatgggcaccatagctagcttcctgagcaagtaccaagacatcatcattgagcatcagaaggtggtgaagggcaatcagaaaagactggagagcctgagagagctggcaggcaaggagaacctggagtaccctagtgtgaccctgccccctcagccccacaccaaggagggggtggatgcctacaatgaggtgattgctagagtgagaatgtgggtgaacctgaacctgtggcagaagctgaagctgagcagagatgatgccaagcccctgctgagactgaagggcttccctagcttccccctggtggagagacaagccaatgaggtggactggtgggacatggtgtgcaatgtgaagaagcttatcaatgagaagaaggaggatggcaaggtgttctggcagaatctggcaggctataagagacaagaggccctgagaccctacctgagctctgaggaggacagaaagaagggcaagaagtttgctagatatcagctgggagacctgctgctgcacctggagaagaagcatggagaggactggggcaaggtgtatgatgaggcctgggagagaattgacaagaaggtggaaggcctgtctaagcacatcaagctggaggaggagagaagatcagaggatgctcagagcaaggctgcactcacagactggcttagagccaaggctagctttgtgatagagggcctgaaggaggcagacaaggatgagttctgcagatgtgagctgaagctgcagaagtggtatggggacctgagaggcaagccctttgccattgaggcagagaacagcatcctggacatcagtggcttcagcaagcagtacaactgtgccttcatctggcagaaggatggtgttaagaagctgaacctgtacctgatcatcaactacttcaaggggggcaagctgagattcaagaagatcaagccagaggcctttgaggccaacagattctacacagtgatcaacaagaagagtggtgagatagtgcccatggaggtgaacttcaactttgatgaccccaacctgatcatcctgcccctggcctttggcaagagacaaggcagagagttcatctggaatgacctgctgagcctggagacaggcagcctgaagctggccaatggcagagtgatagagaagaccctgtacaacagaagaacaagacaagatgagcctgccctgtttgtggccctgacctttgagagaagagaggtgctggatagcagcaacatcaagcccatgaacctgataggagtggacagaggtgaaaatatcccagctgtgattgcattaacagacccagagggctgccccctgagcagattcaaggacagcctgggcaaccccacccacatcctgagaattggggagagctacaaggagaagcagagaaccatccaagccaagaaagaggtggagcagagaagagctgggggctacagcagaaagtatgctagcaaggccaagaacctggcagatgatatggtgagaaacactgctagagacctgctgtactatgctgtgacccaagatgccatgctgatctttgagaacctgagcagaggctttggcagacaaggcaagagaaccttcatggctgagagacagtacacaagaatggaggactggctgacagccaagctggcctatgagggcctgcctagcaagacctatctctcaaaaaccctggctcagtacacaagcaagacatgcagcaactgtggctttaccatcacatcagctgactatgacagagtgctggagaagctgaagaagacagccacaggctggatgaccaccatcaatggcaaggagctgaaagtggaaggccaaataacctactacaacagatacaagagacagaatgtagtgaaggacctgagtgtggagctggacagactgtcagaggagtctgtgaacaatgacatcagcagctggaccaagggcagatcaggtgaggccctgagcctgctgaagaagagattcagccacagacctgtgcaagagaagtttgtgtgcctgaactgtggctttgagacacatgcagatgagcaagctgccctgaacattgctagaagctggctgttcctgagaagccaagagtacaagaagtatcagaccaacaagaccactggcaacacagacaagagagcctttgtggagacctggcagagcttctacagaaagaagctgaaagaggtgtggaagcctgcagtgggcagcccagcagcaaagagagtgaagctggac

SEQ ID NO: 49858 - DNA, 3006 bp, synthetic construct
  source 1..3006: mol_type = other DNA
atggcaccagctgctaagagagtaaaactggatagtaggcaggagattaagagaatcaataaaatcagaagaagactggtgaaggacagcaacaccaaaaaggctggcaagactgggccaatgaagactctgttggtcagggtcatgacccctgacctgagagaaagactggaaaatttgagaaaaaaaccagaaaatatccctcagccaatatctaatacatccagagcaaacctcaataagttgcttacagattatacagaaatgaagaaggccatcttgcatgtgtactgggaggaattccaaaaggacccagtggggctgatgagcagagtggcacaaccagctagtaagaaaattgaccagaataagcttaagccagaaatggatgagaaaggtaacttgacaacagcaggctttgcttgtagtcagtgtggccaacctctgtttgtgtacaagctggagcaggtgagtgaaaaaggaaaggcctacaccaattattttgggaggtgcaatgtggctgagcatgagaagctgatcctcttggcccagctgaaaccagagaaggactcagatgaggcagttacctattccttgggcaagtttggacagagagctctggatttttacagcattcatgtgaccaaggaaagcacccatcctgtgaagccactggcccagattgctggtaacagatatgcttcaggacctgttggtaaagccctgagtgatgcttgcatgggaaccattgcaagcttcctgtcaaagtaccaggacataatcatagagcatcaaaaggtggtgaaaggtaatcagaagaggttggagagcctgagagagctagcagggaaggagaatttggagtacccctctgtgaccctgcctccacaaccccacaccaaggaaggtgtggatgcctataatgaggtgattgctagagtgagaatgtgggtgaacctcaatctgtggcagaaattgaaactctctagagatgatgccaagcccctgcttagacttaagggatttccaagctttcccttggtagaaagacaggccaatgaggtggactggtgggatatggtgtgcaatgttaagaagttgattaatgagaaaaaggaagatgggaaagtgttttggcagaacctggcagggtataaaaggcaggaagctctgagaccttatctgagcagtgaggaagacaggaagaaaggcaagaagtttgctagatatcagttgggtgacctgctgctgcaccttgaaaaaaagcatggtgaggactgggggaaggtgtatgatgaagcttgggagaggattgacaagaaggttgagggcctgagcaagcacatcaaacttgaggaggagagaaggtctgaggatgcccaatcaaaagctgcccttacagactggctgagagcaaaggcaagctttgtcattgaaggactcaaggaggctgataaagatgaattctgcagatgtgaacttaagctccagaaatggtatggggacctcaggggcaaaccctttgccattgaggcagaaaattcaattttggacatcagtggttttagcaaacaatacaattgtgctttcatttggcaaaaggatggagttaagaagttgaacctgtacctgattatcaactattttaaaggtgggaaactgagatttaagaaaataaaaccagaggcatttgaggctaatagattttatactgtgatcaacaaaaaatcaggagagattgttcccatggaggtgaacttcaattttgatgatcccaatttgattatactgcccttggcctttgggaaaagacagggaagggaatttatctggaatgacttgctgagtttggaaactggctcccttaagcttgccaatggaagagtgattgagaagaccctgtataataggagaaccagacaggatgaaccagcactgtttgtagccttgacctttgagaggagagaagttctggactcctcaaacataaaacccatgaacctgataggggttgatagaggagagaacatcccagcagtgattgccttgacagatccagaagggtgtcctctgagtagatttaaggattctctgggaaaccctactcatatcctgagaataggtgaaagctacaaggagaagcagagaacaattcaggccaagaaggaggtagaacaaagaagggcagggggctattctagaaagtatgcttccaaagccaagaatctggcagatgacatggttagaaatactgcaagagacctgctgtattatgcagtcacacaagatgccatgctgatctttgaaaacctgtcaagaggttttgggagacaagggaagaggacatttatggctgaaagacagtacaccaggatggaagattggttgacagccaagcttgcatatgaaggtcttccttccaagacatacctgtctaagacacttgcccagtacacatccaagacttgttccaattgtggatttactattacctcagcagactatgacagagtgctggagaagctcaaaaaaacagctacagggtggatgactactatcaatggtaaagagctgaaggtggaggggcaaatcacatactataatagatataaaagacagaatgtagtgaaggatctgtcagttgaactggacaggctctctgaggaatctgttaataatgatatcagctcttggacaaaggggagatcaggtgaagccctcagtctgctcaaaaaaagattctcccacagacctgttcaggagaaatttgtctgccttaattgtggctttgagactcatgcagatgaacaggctgcacttaatatagccagaagctggctgttcctgaggtctcaggaatataagaagtatcagaccaacaaaaccacaggaaatacagacaagagagcatttgttgagacctggcagagtttctacagaaaaaagttgaaggaggtttggaaaccagcagtggggagtccagctgcaaaaagagtgaagctggac

SEQ ID NO: 49859 - DNA, 3006 bp, synthetic construct
  source 1..3006: mol_type = other DNA
atggccccagcagccaagagagtgaagctggacagcagacaggagatcaagaggatcaacaagatcagaagaaggctggtgaaggacagcaacaccaagaaggctggcaagacaggccccatgaagaccctgctggtgagagtgatgaccccagacctgagagagagactggagaacctgagaaagaagccagagaacatcccccagcccatcagcaacaccagcagagccaacctgaacaagctgctgacagactacacagagatgaagaaggccatcctgcatgtgtactgggaggagttccagaaggacccagtgggcctgatgagcagagtggcccagcctgccagcaagaagatagaccagaacaagctgaagcctgagatggatgagaagggcaacctgaccactgctggctttgcctgctctcagtgtggccagcctctgtttgtgtacaagctggagcaggtgagtgagaagggcaaggcctacaccaactactttggcagatgcaatgtggcagagcatgagaagctgatcctgctggcccagctgaagccagagaaggacagtgatgaggcagtgacctacagcctgggcaagtttggccagagagccctggacttctacagcatccatgtgaccaaggagagcacccaccctgtgaagcccctggcccagatagcaggcaacagatatgcctcaggacctgtgggcaaggccctgtcagatgcctgcatgggaaccattgccagcttcctgagcaagtaccaggacatcatcattgagcaccagaaggtggtgaagggcaaccagaagaggctggagagcctgagagagctggcaggcaaggagaacctggagtacccctctgtgaccctgccccctcagccccacaccaaggagggagtggatgcctacaatgaggtgatagccagagtgaggatgtgggtgaacctgaacctgtggcagaagctgaagctgagcagggatgatgccaagcccctgctgagactgaagggcttccccagcttccccctggtggagaggcaggccaatgaggtggactggtgggacatggtgtgcaatgtgaagaagctgatcaatgagaagaaggaggatggcaaggtgttctggcagaacctggcaggctacaagaggcaggaggccctgaggccctacctgagctcagaggaggacaggaagaagggcaagaagtttgccagataccagctgggagacctgctgctgcacctggagaagaagcatggtgaggactggggcaaggtgtatgatgaggcctgggagagaatagacaagaaggtggagggcctgagcaagcacatcaagctggaggaggagagaagatctgaggatgcccagagcaaggcagccctgacagactggctgagagccaaggccagctttgtgatagagggcctgaaggaggcagacaaggatgagttctgcagatgtgagctgaagctgcagaagtggtatggggacctgaggggcaagccctttgccatagaggcagagaacagcatcctggacatcagtggcttcagcaagcagtacaactgtgccttcatctggcagaaggatggtgtgaagaagctgaacctgtacctgatcatcaactacttcaaggggggcaagctgaggttcaagaagatcaagccagaggcctttgaggccaacaggttctacacagtgatcaacaagaagagtggtgagatagtgcccatggaggtgaacttcaactttgatgaccccaacctgatcatcctgcccctggcctttggcaagagacagggcagagagttcatctggaatgacctgctgagcctggagacaggcagcctgaagctggccaatggcagagtgattgagaagaccctgtacaacagaaggaccagacaggatgagccagccctgtttgtggccctgacctttgagagaagggaggtgctggacagcagcaacatcaagcccatgaacctgataggggtggacagaggtgagaacatccctgcagtgatagccctgactgaccctgagggctgtcccctgagcagattcaaggacagcctgggcaaccccacccacatcctgagaataggggagagctacaaggagaagcagagaaccatccaggccaagaaggaggtggagcagaggagagcagggggctacagcaggaagtatgccagcaaggccaagaacctggctgatgacatggtgagaaacactgccagggacctgctgtactatgcagtgacccaggatgccatgctgatctttgagaacctgagcagaggctttggcagacagggcaagaggaccttcatggcagagagacagtacaccaggatggaggactggctgacagccaagctggcctatgagggcctgcccagcaagacctacctgagcaagaccctggcccagtacaccagcaagacctgcagcaactgtggcttcaccatcacctctgcagactatgacagagtgctggagaagctgaagaagacagccacaggctggatgaccaccatcaatggcaaggagctgaaggtggagggccagatcacctactacaacagatacaagaggcagaatgtggtgaaggacctgtcagtggagctggacagactgtcagaggagtcagtgaacaatgacatcagcagctggaccaagggcagaagtggggaggccctgagcctgctgaagaagagattcagccacagaccagtgcaggagaagtttgtgtgcctgaactgtggctttgagacccatgcagatgagcaggcagctctgaacattgccagaagctggctgttcctgagaagccaggagtacaagaagtaccagaccaacaagaccactggcaacacagacaagagggcctttgtggagacctggcagagcttctacagaaagaagctgaaggaggtgtggaagcctgctgtgggcagcccagcagctaaaagggtgaagctggac

SEQ ID NO: 49860 - DNA, 3006 bp, synthetic construct
  source 1..3006: mol_type = other DNA
atggccccagctgccaagagagtgaagctggacagcagacaggagatcaagaggatcaacaagatcagaagaaggctggtgaaggacagcaacaccaagaaggctggcaagacaggccccatgaagaccctgctggtgagagtgatgaccccagacctgagagagagactggagaacctgagaaagaagcctgagaacatcccccagcccatcagcaacaccagcagagccaacctgaacaagctgctgacagactacactgagatgaagaaggccatcctgcatgtgtactgggaggagttccagaaggaccctgtgggcctgatgagcagagtggcccagcctgccagcaagaagattgaccagaacaagctgaagcctgagatggatgagaagggcaacctgaccacagctggctttgcctgcagccagtgtggccagcccctgtttgtgtacaagctggagcaggtgagtgagaagggcaaggcctacaccaactactttggcagatgcaatgtggcagagcatgagaagctgatcctgctggcccagctgaagccagaaaaggacagtgatgaggctgtgacctacagcctgggcaagtttggccagagagccctggacttctacagcatccatgtgaccaaggagagcacccacccagtgaagcccctggcccagattgcaggcaacagatatgcctctggccctgtgggcaaggccctgtcagatgcctgcatgggcaccatagccagcttcctgagcaagtaccaggacatcatcatagagcaccagaaggtggtgaagggcaaccagaagaggctggagagcctgagagagctggcaggcaaggagaacctggagtacccctcagtgaccctgcccccccagccccacaccaaggagggggtggatgcctacaatgaggtgatagccagagtgaggatgtgggtgaacctgaacctgtggcagaagctgaagctgagcagggatgatgccaagcccctgctgagactgaagggcttccccagcttccccctggtggagaggcaggccaatgaggtggactggtgggacatggtgtgcaatgtgaagaagctgatcaatgagaagaaggaggatggcaaggtgttctggcagaacctggctggctacaagaggcaggaggccctgaggccctacctgagcagtgaggaggacaggaagaagggcaagaagtttgccagataccagctgggggacctgctgctgcacctggagaagaagcatggagaggactggggcaaggtgtatgatgaggcctgggagagaattgacaagaaggtggagggcctgagcaagcacatcaagctggaggaggagagaagaagtgaggatgcccagagcaaggctgccctgacagactggctgagagccaaggccagctttgtgatagagggcctgaaggaggcagacaaggatgagttctgcagatgtgagctgaagctgcagaagtggtatggagacctgaggggcaagccctttgccatagaggcagagaacagcatcctggacatcagtggcttcagcaagcagtacaactgtgccttcatctggcagaaggatggggtgaagaagctgaacctgtacctgatcatcaactacttcaagggaggcaagctgaggttcaagaagatcaagccagaggcctttgaggccaacaggttctacacagtgatcaacaagaagtctggggagattgtgcccatggaggtgaacttcaactttgatgaccccaacctgatcatcctgcccctggcctttggcaagagacagggcagagagttcatctggaatgacctgctgagcctggagacaggcagcctgaagctggccaatggcagagtgatagagaagaccctgtacaacagaaggaccagacaggatgagccagccctgtttgtggccctgacctttgagagaagggaggtgctggacagcagcaacatcaagcccatgaacctgataggagtggacagaggggagaacatcccagcagtgattgccctgactgaccctgagggctgccccctgagcagattcaaggacagcctgggcaaccccacccacatcctgagaataggagagagctacaaggagaagcagagaaccatccaggccaagaaggaggtggagcagaggagagcaggaggctacagcaggaagtatgccagcaaggccaagaacctggcagatgacatggtgagaaacactgccagggacctgctgtactatgcagtgacccaggatgccatgctgatctttgagaacctgagcagaggctttggcagacagggcaagaggaccttcatggctgagagacagtacaccaggatggaggactggctgacagccaagctggcctatgagggcctgcccagcaagacctacctgagcaagaccctggcccagtacaccagcaagacctgcagcaactgtggcttcaccatcaccagtgcagactatgacagagtgctggagaagctgaagaagacagccacaggctggatgaccaccatcaatggcaaggagctgaaggtggagggccagatcacctactacaacagatacaagaggcagaatgtggtgaaggacctgtctgtggagctggacagactgagtgaggagagtgtgaacaatgacatcagcagctggaccaagggcagatcaggagaggccctgagcctgctgaagaagagattcagccacagacctgtgcaggagaagtttgtgtgcctgaactgtggctttgagacccatgcagatgagcaggcagccctgaacatagccagaagctggctgttcctgagaagccaggagtacaagaagtaccagaccaacaagaccacaggcaacactgacaagagggcctttgtggagacctggcagagcttctacagaaagaagctgaaggaggtgtggaagccagctgtgggcagccctgcagccaaaagggtgaagctggac

SEQ ID NO: 49861 - DNA, 3006 bp, synthetic construct
  source 1..3006: mol_type = other DNA
atggccccagctgccaagagagtgaagctggacagcagacaggagatcaagaggatcaacaagatcagaagaaggctggtgaaggacagcaacaccaagaaggctggcaagacaggccccatgaagaccctgctggtgagagtgatgacccctgacctgagagagagactggagaacctgagaaagaagcctgagaacatcccccagcccatcagcaacaccagcagagccaacctgaacaagctgctgacagactacactgagatgaagaaggccatcctgcatgtgtactgggaggagttccagaaggaccctgtgggcctgatgagcagagtggcccagccagccagcaagaagatagaccagaacaagctgaagcctgagatggatgagaagggcaacctgaccactgctggctttgcctgcagccagtgtggccagcccctgtttgtgtacaagctggagcaggtgagtgagaagggcaaggcctacaccaactactttggcagatgcaatgtggctgagcatgagaagctgatcctgctggcccagctgaagcctgagaaggactcagatgaggcagtgacctacagcctgggcaagtttggccagagagccctggacttctacagcatccatgtgaccaaggagagcacccaccctgtgaagcccctggcccagattgcaggcaacagatatgcctcaggccctgtgggcaaagccctgtcagatgcctgcatgggcaccatagccagcttcctgagcaagtaccaggacatcatcatagagcaccagaaggtggtgaagggcaaccagaagaggctggagagcctgagagagctggcaggcaaggagaacctggagtaccccagtgtgaccctgcccccccagccccacaccaaggagggggtggatgcctacaatgaggtgatagccagagtgaggatgtgggtgaacctgaacctgtggcagaagctgaagctgagcagggatgatgccaagcccctgctgagactgaagggcttccccagcttccccctggtggagaggcaggccaatgaggtggactggtgggacatggtgtgcaatgtgaagaagctgatcaatgagaagaaggaggatggcaaggtgttctggcagaacctggcaggctacaagaggcaggaggccctgaggccctacctgagcagtgaggaggacaggaagaagggcaagaagtttgccagataccagctgggtgacctgctgctgcacctggagaagaagcatggagaggactggggcaaggtgtatgatgaggcctgggagagaattgacaagaaggtggagggcctgagcaagcacatcaagctggaggaggagagaagatcagaggatgcccagagcaaggcagccctgacagactggctgagagccaaggccagctttgtgattgagggcctgaaggaggctgacaaggatgagttctgcagatgtgagctgaagctgcagaagtggtatggagacctgaggggcaagccctttgccattgaggcagagaacagcatcctggacatcagtggcttcagcaagcagtacaactgtgccttcatctggcagaaggatggagtgaagaagctgaacctgtacctgatcatcaactacttcaaggggggcaagctgaggttcaagaagatcaagccagaggcctttgaggccaacaggttctacactgtgatcaacaagaagtctggggagatagtgcccatggaggtgaacttcaactttgatgaccccaacctgatcatcctgcccctggcctttggcaagagacagggcagagagttcatctggaatgacctgctgagcctggagacaggcagcctgaagctggccaatggcagagtgatagagaagaccctgtacaacagaaggaccagacaggatgagccagccctgtttgtggccctgacctttgagagaagggaggtgctggacagcagcaacatcaagcccatgaacctgattggtgtggacagaggggagaacatcccagctgtgattgccctgacagacccagagggctgccccctgagcagattcaaggacagcctgggcaaccccacccacatcctgagaattggagagagctacaaggagaagcagagaaccatccaggccaagaaggaggtggagcagaggagagcaggtggctacagcaggaagtatgccagcaaggccaagaacctggctgatgacatggtgagaaacactgccagggacctgctgtactatgcagtgacccaggatgccatgctgatctttgagaacctgagcagaggctttggcagacagggcaagaggaccttcatggctgagagacagtacaccaggatggaggactggctgacagccaagctggcctatgagggcctgcccagcaagacctacctgagcaagaccctggcccagtacaccagcaagacctgcagcaactgtggcttcaccatcaccagtgcagactatgacagagtgctggagaagctgaagaagactgccactggctggatgaccaccatcaatggcaaggagctgaaggtggagggccagatcacctactacaacagatacaagaggcagaatgtggtgaaggacctgtcagtggagctggacagactgtctgaggagtctgtgaacaatgacatcagcagctggaccaagggcagaagtggtgaggccctgagcctgctgaagaagagattcagccacagaccagtgcaggagaagtttgtgtgcctgaactgtggctttgagacccatgcagatgagcaggctgccctgaacatagccagaagctggctgttcctgagaagccaggagtacaagaagtaccagaccaacaagaccactggcaacacagacaagagggcctttgtggagacctggcagagcttctacagaaagaagctgaaggaggtgtggaagccagcagtgggcagccctgctgctaagagggtgaagctggac

SEQ ID NO: 49862 - DNA, 3006 bp, synthetic construct
  source 1..3006: mol_type = other DNA
atggccccagcggccaaacgggtgaagctggactctagacaagagatcaagagaatcaacaagatcagaaggagactggtcaaggacagcaacacaaagaaggccggcaagacaggccccatgaaaaccctgctcgtcagagtgatgacccctgacctgagagagcggctggaaaacctgagaaagaagcccgagaacatccctcagcctatcagcaacaccagcagggccaacctgaacaagctgctgaccgactacaccgagatgaagaaagccatcctgcacgtgtactgggaagagttccagaaagaccccgtgggcctgatgagcagagttgctcagcctgccagcaagaagatcgaccagaacaagctgaagcccgagatggacgagaagggcaatctgaccacagccggctttgcctgctctcagtgtggccagcctctgttcgtgtacaagctggaacaggtgtccgagaaaggcaaggcctacaccaactacttcggcagatgtaacgtggccgagcacgagaagctgattctgctggcccagctgaaacctgagaaggactctgatgaggccgtgacctacagcctgggcaagtttggacagagagccctggacttctacagcatccacgtgaccaaagaaagcacacaccccgtgaagcccctggctcagatcgccggcaatagatacgcctctggacctgtgggcaaagccctgtccgatgcctgcatgggaacaatcgccagcttcctgagcaagtaccaggacatcatcatcgagcaccagaaggtggtcaagggcaaccagaagagactggaaagcctgagggagctggccggcaaagagaacctggaataccccagcgtgaccctgcctcctcagcctcacacaaaagaaggcgtggacgcctacaacgaagtgatcgccagagtgagaatgtgggtcaacctgaacctgtggcagaagctgaaactgtccagggacgacgccaagcctctgctgagactgaagggcttccctagcttccctctggtggaaagacaggccaatgaagtggattggtgggacatggtctgcaacgtgaagaagctgatcaacgagaagaaagaggatggcaaggttttctggcagaacctggccggctacaagagacaagaagccctgaggccttacctgagcagcgaagaggaccggaagaagggcaagaagttcgccagataccagctgggcgacctgctgctgcacctggaaaagaagcacggcgaggactggggcaaagtgtacgatgaggcctgggagagaatcgacaagaaggtggaaggcctgagcaagcacattaagctggaagaggaaagaaggagcgaggacgcccaatctaaagccgctctgaccgattggctgagagccaaggccagctttgtgatcgagggcctgaaagaggccgacaaggacgagttctgcagatgcgagctgaagctgcagaagtggtacggcgatctgagaggcaagcccttcgccattgaggccgagaacagcatcctggacatcagcggcttcagcaagcagtacaactgcgccttcatttggcagaaagacggcgtcaagaaactgaacctgtacctgatcatcaattacttcaaaggcggcaagctgcggttcaagaagatcaaacccgaggccttcgaggctaacagattctacaccgtgatcaacaaaaagtccggcgagatcgtgcccatggaagtgaacttcaacttcgacgaccccaacctgattatcctgcctctggccttcggcaagagacagggcagagagttcatctggaacgatctgctgagcctggaaaccggctctctgaagctggccaatggcagagtgatcgagaaaaccctgtacaacaggagaaccagacaggacgagcctgctctgtttgtggccctgaccttcgagagaagagaggtgctggacagcagcaacatcaagcccatgaacctgatcggcgtggaccggggcgagaatatccctgctgtgatcgccctgacagaccctgaaggatgcccactgagcagattcaaggactccctgggcaaccctacacacatcctgagaatcggcgagagctacaaagagaagcagaggacaatccaggccaagaaagaggtggaacagagaagagccggcggatactctaggaagtacgccagcaaggccaagaatctggccgacgacatggtccgaaacaccgccagagatctgctgtactacgccgtgacacaggacgccatgctgatcttcgagaatctgagcagaggcttcggccggcagggcaagagaacctttatggccgagaggcagtacaccagaatggaagattggctcacagctaaactggcctacgagggactgcccagcaagacctacctgtccaaaacactggcccagtatacctccaagacctgcagcaattgcggcttcaccatcaccagcgccgactacgacagagtgctggaaaagctcaagaaaaccgccaccggctggatgaccaccatcaacggcaaagagctgaaggttgagggccagatcacctactacaacaggtacaagaggcagaacgtcgtgaaggatctgagcgtggaactggacagactgagcgaagagagcgtgaacaacgacatcagcagctggacaaagggcagatcaggcgaggctctgagcctgctgaagaagaggtttagccacagacctgtgcaagagaagttcgtgtgcctgaactgcggcttcgagacacacgccgatgaacaggctgccctgaacattgccagaagctggctgttcctgagaagccaagagtacaagaagtaccagaccaacaagaccaccggcaacaccgacaagagggcctttgtggaaacctggcagagcttctacagaaaaaagctgaaagaagtctggaagcccgccgtgggatccccagccgcgaagcgagtgaaactggac

SEQ ID NO: 49863 - DNA, 23 bp, synthetic construct
  source 1..23: mol_type = other DNA
gcggcctctagactcgaggcgtt

SEQ ID NO: 49864 - DNA, 252 bp, synthetic construct
  source 1..252: mol_type = other DNA
aatggaggcggtactatgtagatgagaattcaggagcaaactgggaaaagcaactgcttccaaatatttgtgatttttacagtgtagttttggaaaaactcttagcctaccaattcttctaagtgttttaaaatgtgggagccagtacacatgaagttatagagtgttttaatgaggcttaaatatttaccgtaactatgaaatgctacgcatatcatgctgttcaggctccgtggccacgcaactcatact

SEQ ID NO: 49865 - DNA, 18 bp, synthetic construct
  source 1..18: mol_type = other DNA
ctctggctaactaccggt

SEQ ID NO: 49866 - DNA, 208 bp, synthetic construct
  source 1..208: mol_type = other DNA
ctgtgccttctagttgccagccatctgttgtttgcccctcccccgtgccttccttgaccctggaaggtgccactcccactgtcctttcctaataaaatgaggaaattgcatcgcattgtctgagtaggtgtcattctattctggggggtggggtggggcaggacagcaagggggaggattgggaagagaatagcaggcatgctgggga

SEQ ID NO: 49867 - DNA, 241 bp, synthetic construct
  source 1..241: mol_type = other DNA
gagggcctatttcccatgattccttcatatttgcatatacgatacaaggctgttagagagataattggaattaatttgactgtaaacacaaagatattagtacaaaatacgtgacgtagaaagtaataatttcttgggtagtttgcagttttaaaattatgttttaaaatggactatcatatgcttaccgtaacttgaaagtatttcgatttcttggctttatatatcttgtggaaaggac

SEQ ID NO: 49868 - DNA, 20 bp, synthetic construct
  source 1..20: mol_type = other DNA
caagaggagaagcagtttgg

SEQ ID NO: 49869 - DNA, 17 bp, synthetic construct
  source 1..17: mol_type = other DNA
ttttttttggcggccgc

SEQ ID NO: 49870 - DNA, 30 bp, synthetic construct
  source 1..30: mol_type = other DNA
actagtttagagctcgctgatcagcctcga
